United States Patent Application Publication US 2019/0033306 A1 - sequence listing, part 2

SEQ ID NO: 2008 - RNA, 3960 nt, Homo sapiens
uuagauagagucuuguuauguugcccuggcuggagugcagugguuauucacaggcaugaucacagcauacuucaggcuggaacuccugggcuugaauggucuuucugccuuagccuccugagcagcugggacuauaggugcaugacgccgcaccuggccauaacacuccuucucagcucauuuuugagucaugaaaaaugcucuuucaagaaucaccaggccuaugauaagucccauggaacaaaccuaucacuguguaagagcugagcaggagaaaaccaucucuccucauacaccucauuuguucauucaauaaaaauucaugacacaccacuauggacaucaggaaguagagaugaauaaggcugggucucugcccuaagugauuagccuggaaagccauacuggacacaguguccauacuggccuccuugucuccuuuccugccccucccugcacuccuuuacauaacagccagaacaguucucucaaacauaaagcagauccccagcuuaaacccuuuaaagaccuucaugaggcccuaugugacaggagaagcaggagaaggugguggaugagaagaugaggcuguacugaguucagggcaccugaacucaagggagacuuucacagggugcucgacucugucccaacuccuaaagugacuacuggggacuacugaggucugaauggggugggggugaggggucaagacagacauacuagauccaauggcaauauggcucaaaacccuaggucuguuaaguuguagucuggcccaugagggaaauucuuuauuuggaugcuucagugaccaagagacagagcauuaggcacacacagaagcacacacauacacacaaacacacacacacacacacacacauccacacacaauaugcaaagcaaaggcauuucacaggugaagggauagggagugggggaaggaggccacgagagcagcuaggggcuucuuugacacaaugaagagaagccucugauggugacacuccuuggaauucucgucucaagguuacaaggaaaaaucuauccguguggacucagucccaggccauaaaacacagcaaagauagagaaaucuggguguggggccugggaaacgccuguuccucacuguagaaaccugcaucagcucucucuuucuuucccugggacccagaaaucacccgguggaugauggggaaggcuagcaccacagcaaacugggcaagugguccgcugcacaagggggaagagagggcuaguagggccgaggguagcaaugaaccucacagcuagcgggcaugaggcagucugccuuuaggggcagaacccucagggagacuugcauguggggcacuuucccguguaaccuagggucagagcaccucugauggaggaggggaaaggucccauccccauuggaguguccuaugaucucaguggacauggaggccgcccccagccccagcucguugccaacugcugcagauccuuagcaccauucaggaacuguggagggggcagcggggguagcaaugcuccgccaagauugugucacugcuccaggaggauacuucacaguuggcagaaaccugcgcaacuggccauaucuggucuaagacucaggaaagccugcaccuucugggggaaggcagagugucguauuagcuccaagcucccauguugcagccauuuccucuguuuccugcccugccccagguuuggcaugaaaguuccagguuuugcuggaaaugucuagggcccagagagaucucugcucuuuaguugcaagaacuggcccaaaacugaccuuuagaggaaagacagguggcaggggccucagcaccuaaggcccagagggguugggaaauggggaaagccacccuccaaacuaccaccccgcgagaccccgagucucucaauacccuugccuccccugucaugaccuacaggaccccugccaaaggggagcagcaggagugaauuagcccggaccaaugagaggcugucuguggcccaauccugccucaggcccguguacuuuccuggugagaacaacgagcaagagggagccaagggcugagcagucacgggaagcuggcucauggcuggcccaauaugggaugcugggcagaaucaccucuagucuuccaaggugguugagucuuucugaauggguugccuuugcauuggaaucuggcccagggaugaugccacuguuuuuggugacugguucuuguguuugaagccgcugacaugagcuugguacuguucuauggaguucagcacuaucuuacauguuuugcagggguagcccuuuccagcuggaaagucagugacagcaggguccgccagccgcccauagcgugccauuaguuugagcuuggucuccuguuuucuguguuucuugcccacauaauguuguugagccaugacagggucguugaaaguugcauggcagaggcugcagaacuugucugggucuaucaucucucuauucuggugcaaggcuuccaccuuaguggacugcugcuucagcuuuaaguucuuugcgugggucuuccccagguagugcgacugggccacgacaggggaggaaaaggucauguuacagauggggcagcacugguucuugucuuugcuucugcugcucugguaaugugccagcuucugggacucagaaauaagcaaggcgcagcaaaccuuacacuggguguuggugaagagacauugguucuucuggaucaugugcuccacuuucauuuuugaauguguguuaaucaacggaucagaacaaauccugcagggccaccaugggcgucucuugaauuuugcccagaugagaucuccaacuucauacuucaguggcguagacuuuuucuuagguugacaaaauggcaauuccugugaaguagaugaugaugaaguuccagguaauucuagcauguuuccuaauguacugguacuggaaucuggaucauccugaaaagauaaauuuauugaguuuaauugcucuucuauuguaauguuugugucuccuagugaaaagggggcugggagaagggcugcuuuuucauugcugccguccacuucauuucuuugcuuauuuuucuguguuucagucugaggagcuaauggcaagaauggcgauuugacugcaccgugucuacucucuggugugcugucuuguucacuucccauggccacuuuuacaccauucucugauuuagucucauaauugcagguggcauuggucugaguuuccucaaagaucuccucuauacucucauccucugugacuggcuguucuggguccauuucagaaucuacaucugcaucguccacacaaguaaaauucucaaagugcagaaagccauucuugauagucuuuguuacuuuuaccuggaguucaggggaguuauuacaagaggguuccuguuucauagcaagugcuguaggaccaccaggacucaaggaagugcaaacaauuggcgucugagcucuugaaucacuuuuuucagggucuugaaaggauucugauccaucagcagacccauuuaaauacucuacauugaucauggaggccaaauccuguagucuccgcaguggaauguaacaagauggagaaucuuguccauaagcauuuugggauguuccacugacagucgauaacugcauaguacacccauuaaguggcucagaaaaauuggauugaccauuaccgaaagggcuguccuugucuucaggggcaucuaaauucacuggauuggaaaagggcagcagacaauuucuucuggguaguucacaggucugauccauccugggccggcaucaaccgugccccgcgcccccucccgggccagcuggggggagggggugacccucauuacacuggggugcgagcggagcgguggggagagagcggggccgcucgccgcaccccccuccccccgcguc

SEQ ID NO: 2009 - skipped

SEQ ID NO: 2010 - RNA, 7232 nt, Homo sapiens
uuagauagagucuuguuauguugcccuggcuggagugcagugguuauucacaggcaugaucacagcauacuucaggcuggaacuccugggcuugaauggucuuucugccuuagccuccugagcagcugggacuauaggugcaugacgccgcaccuggccauaacacuccuucucagcucauuuuugagucaugaaaaaugcucuuucaagaaucaccaggccuaugauaagucccauggaacaaaccuaucacuguguaagagcugagcaggagaaaaccaucucuccucauacaccucauuuguucauucaauaaaaauucaugacacaccacuauggacaucaggaaguagagaugaauaaggcugggucucugcccuaagugauuagccuggaaagccauacuggacacaguguccauacuggccuccuugucuccuuuccugccccucccugcacuccuuuacauaacagccagaacaguucucucaaacauaaagcagauccccagcuuaaacccuuuaaagaccuucaugaggcccuaugugacaggagaagcaggagaaggugguggaugagaagaugaggcuguacugaguucagggcaccugaacucaagggagacuuucacagggugcucgacucugucccaacuccuaaagugacuacuggggacuacugaggucugaauggggugggggugaggggucaagacagacauacuagauccaauggcaauauggcucaaaacccuaggucuguuaaguuguagucuggcccaugagggaaauucuuuauuuggaugcuucagugaccaagagacagagcauuaggcacacacagaagcacacacauacacacaaacacacacacacacacacacacauccacacacaauaugcaaagcaaaggcauuucacaggugaagggauagggagugggggaaggaggccacgagagcagcuaggggcuucuuugacacaaugaagagaagccucugauggugacacuccuuggaauucucgucucaagguuacaaggaaaaaucuauccguguggacucagucccaggccauaaaacacagcaaagauagagaaaucuggguguggggccugggaaacgccuguuccucacuguagaaaccugcaucagcucucucuuucuuucccugggacccagaaaucacccgguggaugauggggaaggcuagcaccacagcaaacugggcaagugguccgcugcacaagggggaagagagggcuaguagggccgaggguagcaaugaaccucacagcuagcgggcaugaggcagucugccuuuaggggcagaacccucagggagacuugcauguggggcacuuucccguguaaccuagggucagagcaccucugauggaggaggggaaaggucccauccccauuggaguguccuaugaucucaguggacauggaggccgcccccagccccagcucguugccaacugcugcagauccuuagcaccauucaggaacuguggagggggcagcggggguagcaaugcuccgccaagauugugucacugcuccaggaggauacuucacaguuggcagaaaccugcgcaacuggccauaucuggucuaagacucaggaaagccugcaccuucugggggaaggcagagugucguauuagcuccaagcucccauguugcagccauuuccucuguuuccugcccugccccagguuuggcaugaaaguuccagguuuugcuggaaaugucuagggcccagagagaucucugcucuuuaguugcaagaacuggcccaaaacugaccuuuagaggaaagacagguggcaggggccucagcaccuaaggcccagagggguugggaaauggggaaagccacccuccaaacuaccaccccgcgagaccccgagucucucaauacccuugccuccccugucaugaccuacaggaccccugccaaaggggagcagcaggagugaauuagcccggaccaaugagaggcugucuguggcccaauccugccucaggcccguguacuuuccuggugagaacaacgagcaagagggagccaagggcugagcagucacgggaagcuggcucauggcuggcccaauaugggaugcugggcagaaucaccucuagucuuccaaggugguugagucuuucugaauggguugccuuugcauuggaaucuggcccagggaugaugccacuguuuuuggugacugguucuuguguuugaagccgcugacaugagcuugguacuguucuauggaguucagcacuaucuuacauguuuugcagggguagcccuuuccagcuggaaagucagugacagcaggguccgccagccgcccauagcgugccauuaguuugagcuuggucuccuguuuucuguguuucuugcccacauaauguuguugagccaugacagggucguugaaaguugcauggcagaggcugcagaacuugucugggucuaucaucucucuauucuggugcaaggcuuccaccuuaguggacugcugcuucagcuuuaaguucuuugcgugggucuuccccagguagugcgacugggccacgacaggggaggaaaaggucauguuacagauggggcagcacugguucuugucuuugcuucugcugcucugguaaugugccagcuucugggacucagaaauaagcaaggcgcagcaaaccuuacacuggguguuggugaagagacauugguucuucuggaucaugugcuccacugugcgacauucauugcagauaaauuuuccucuuggcaucucagucaauccaaggcacuccagguggaaagccccacagcacugagccucacauaacagcagcucacccaauuuuucacaauucugacagacauucuccuugagugcagcuccuccaccgcguucacccugcauuuuuuuagaggcaggcaucccgggaucguguucuacaccuuccucaacagucuccuuggggcuuguggccguccugugaggcauuaguucucccucugagccuggaaucucuuuugacgagucaucauuuuucacuuuuuuacacugcaucuuggcugcagcaugccucugucguuuucgcuuccuuggcuugucaaauaucuugguagugccuccaccaaaaucuuuugaauaagauguggcacaagauucaguuaugccauucuccaggugaccagcuucauagcacuuuuuagaaaggccaaggucccccuucuugggcauaaauccagggucuaaaucauuggauucaagaaguuucuuaguugguuuucuuugacguuuacuuucauaauuuccuggcguuuuaacuagcaauuccucagacucaagggcaggccguggagagacuuccggagccacaggcacagacaaggucagcugcggcaacucagcauguccaccuccaaguucugacugagccaaggggcccuccaaaaacggagccucccuuucaagaacuggaggcucuucuuugguugaaaucaaagaauucucguccaccugcuuguucugagcacuagaucgaccucgggcuagaaggcuuuccucuucacagcgggaacuuaccuugugcaccugcuccuguaccuucuuuuguuuuuucuuaggagcaaauaucugaucauauucuucuguauauuccaaaagccacuugcuuggcuuccuaaggcguuucuucucugaccgcacagcugguucagggagcucagccuguggugucaaacugggaauuccuggcuccuuuuccaugucaccaaugcuggcacuggauuuaucacaaacauuuaaccguggcccagcugaaucuaagcagucagcaugauuuugcucugucagugguuccucaaguaugcuugcugaaggaguucuaugcucuggaaacucaucccgccccuccugcacagggucacuaggaaguaagacccuaaaggcacacucagaguuuucuuucucuuuaaaucuguucaugcgcuuacgagguuuagugcgccuuugguuuaaacgcugccaccgcuuuuuaggcaccacuugauuuacaccauugaguucaucauucucacuguucauuacagaguccagcucugggccuuuuccguuuucaaaagagaguccuuuuucagaaauuuuaccaggaucagauugcuuaaccuugcuaucgaaaugcacaucagaaaaauggucaccaucuucacuuguuaaguggcccauuaucugaaggggauccucuuuacuaggaucuucugccccaccucucaaugaaccuccacguucucggucucccugcaguacagcaucaagagucacacuuggaagcugauucaguuuucuuuugcgcucggucuuuaaggcuuuacgguucacuguguucuuuaccauuugggcugaaaaagcaucucgcaauuuggaugaaggcuuugaucguccacaguugcgccuaguaacacagucugaacgacuuuuaccagaagcagggaggucucucuugucggacaguaagccagguagggaagcagacaacucgccagauaaugcagagucacccccacuagggcuaggauuggcggaguucugagugccaucucccuuuuucucugaauuguguguggagccuccugaaaccaaaaccuuagagacuccuacaggacuauuaguagaacaguccccacgaccaggacuccgguaagagaccagguuuugagcagucaucaaccgcugcuccuucgucuuacuaucaugcauaucuuucaacaucauuagcaauguacugaauuuguagucugguucaauagguaugugauucugacuagaagcagaagagaaaaguaaugguuuugauggcuuugauguuccagagucacugacauccucaccuaaggaucuguaagagaguuccuucaacucggauaaaacauguuucaccacugcuguuucuaugucacuugaaucccugguuuucucaugcauauuguucaguaguuuuagaccauccacuuucccacuuuuagaaaugcuggccaaaggagagccuuugguaucagaagagcagcauuucaaacugcacuccucauuuauaacuggggguucugccauaacuggauuuucuuuguguuugcacuuuauacuucggaacuugggcuguuugcuuuucgaauguaauagagcuugauuugcugccccacccuuuauuaacgaguucucacuggauaugcuugaugacagguugaauuuuggagagagagcaucauuuguaaaaucugacugggguuugugaacaagaguagaugccuucagaucagagagauuaaccugagacgucucgguuccaggcucugcacucuuaguacaacccauuaaguggucuguaugugaguuacuaaugagaggcuucuguuuugcuuuuacccuaguguuuguggcagcaaaccuagaauacuuuaucuuuucauuuuucugcauagauaacauguucucuguucuaucgaaagcaucuggaauuucaaggacacuguuaucagacucugagcuguguucuaugggauccaggucacugcuuccaucaucagaagugguacagauacuaauggaaucacuucgcuuuuccucaucaccugcuccaauauagcagagcuucacuuuugaaccacacaccaggcuucguugggguuuauucuucucucgagaacacuuugagaucaaagcacccucaggcaagcccaauaaagagucaccauuugaagucucaaauucuuucuuugcaguguuuuuuccacaggaagaaaacagaaaacuuccuggggcaguguuggacccugugaggcuauuugcuauccuggaaaguucauuagaggccugcguaucagauauauccccagagauaaaguuuaggccaagguucucuggaaucuuuccccuccguucaucuuuaugugcuucaaauuguauguggcccuuuuucacacuaguccuuuuuggauuaucagagcucuuucuggcucgagauuuagcgcaaggcuuuuccuucucaucugcagaauguucagaaucaaaagccagugauuucaaacagccauuaagcaacaggucauguucugacucaggaucauuugugcagucuucaaauggcauaucuucuucacuguccaacuugauugaaccaggaauacauuuucgguucuuugaccccuugggaacaucauacuguucugcaaguccaacacuggcuucccauuuacucaaaauuuucugaggaacaaauggcaauuccugugaaguagaugaugaugaaguuccagguaauucuagcauguuuccuaauguacugguacuggaaucuggaucauccugaaaagauaaauuuauugaguuuaauugcucuucuauuguaauguuugugucuccuagugaaaagggggcugggagaagggcugcuuuuucauugcugccguccacuucauuucuuugcuuauuuuucuguguuucagucugaggagcuaauggcaagaauggcgauuugacugcaccgugucuacucucuggugugcugucuuguucacuucccauggccacuuuuacaccauucucugauuuagucucauaauugcagguggcauuggucugaguuuccucaaagaucuccucuauacucucauccucugugacuggcuguucuggguccauuucagaaucuacaucugcaucguccacacaaguaaaauucucaaagugcagaaagccauucuugauagucuuuguuacuuuuaccuggaguucaggggaguuauuacaagaggguuccuguuucauagcaagugcuguaggaccaccaggacucaaggaagugcaaacaauuggcgucugagcucuugaaucacuuuuuucagggucuugaaaggauucugauccaucagcagacccauuuaaauacucuacauugaucauggaggccaaauccuguagucuccgcaguggaauguaacaagauggagaaucuuguccauaagcauuuugggauguuccacugacagucgauaacugcauaguacacccauuaaguggcucagaaaaauuggauugaccauuaccgaaagggcuguccuugucuucaggggcaucuaaauucacuggauuggaaaagggcagcagacaauuucuucuggguaguucacaggucugauccauccugggccggcaucaac

SEQ ID NO: 2011 - RNA, 6993 nt, Homo sapiens
aaacaaguuuuauuuugagaacauuuuaaaauacagaaaaaguacacagggucauaccauacccagcugcucagaauugacaauuguucauuaccauuucuuuuuuuuaaguugaaacagggucucauuauguugcccaggcuggucuugaacuccugggcucaagcaaucugccugucucggccuccaaaagugcugggaguacaggcuugagccaccgcaccuggccuauuuuaucauucuuuuccaacccuuuucuaccuuggcuucuccacaggcuccagggaggucuagcuuggcuggucaaaacggaggugacauugacagaaagugagugauuaaagguugggugucagagucggacagaucuggguuuuuuuuggagacagagucuuacucugucgcucaggcuggaaugcaguggcacgaucuaggcucacugcaaccaccaccuccuggguucaagugauucuccugccucagccaccugaguagcugggauuacgggugugugccaccacgcccagcuaauuuuuguauuuuugguagagacgggguuuugccauuguuggccaggcuugaacuccuggccacaggagaucugcuggccucagucucccaaagggcugggauuauaggugugagccaccuugcccagugacagaucuggguuugagucccgaaaacucuuuguggucacggacaaaucacuuaaccucaagccucaguuucaucuucugugaaaugggaauaauacaucuuccgugaggacucaguaugaugauguaugucaagcacaaugccagugccuggcauauaccccuugcucacugaagaguagccaauaugaauauuugcagcuaugggccugggacccacccaaaagcaugggcaacacccuccugugaccgaaagggagggacugugagaaugaccccuccucagccuucauuucuccucauuucccacccguccucaauucuggguacaucugucuccaguuuauacucugaagacagcagggcugugaguuacagguugcccagggcauuuuuguggaggcagagaguuuagagcugaugacagccugggagagcucuggggaggcuuccaaaccaaaguggauggaggggaacuggggaggagggaucugagugagguuagucccggcuaaccucacucaguucuaacuacccugggcugguccuggggcuucucacagccucaguagcaccccccguccccuuauucacuggucucggauacucuagaccuguggccuggcuugcuaggacaggggcuuucaggcuuugccagacucagccucucuagacuugggccuacaagccucacacccaccggguguuggcaugcacgucuguuuggaggaggaccgacagcugggaaguggcagaggcugggcuggaagggugagaggguugguggucuccagggaagcgggaaguaaacucgugcccuucuguacuuugcccggugcccuggaccauggaggguuucguuggggugugaauaacagaaaccuaagugagcagggccuaaaugaaacaguguauccaucucucacuuagccccacguccagagguggguguagguuggucugaagucaggguugaggacucguccguucuccagguuuuucucucauggucgcaagauguuggcuucagcugcugccgucacauuugugcagaggcaggaggaaggaagaaguuccagagaguugaguuuccacacagcaacucccaauuucauuuccuuggccagacugugacacggccaccccuagcucuagucuuccaaggugguugagucuuucugaauggguugccuuugcauuggaaucuggcccagggaugaugccacuguuuuuggugacugguucuuguguuugaagccgcugacaugagcuugguacuguucuauggaguucagcacuaucuuacauguuuugcagggguagcccuuuccagcuggaaagucagugacagcaggguccgccagccgcccauagcgugccauuaguuugagcuuggucuccuguuuucuguguuucuugcccacauaauguuguugagccaugacagggucguugaaaguugcauggcagaggcugcagaacuugucugggucuaucaucucucuauucuggugcaaggcuuccaccuuaguggacugcugcuucagcuuuaaguucuuugcgugggucuuccccagguagugcgacugggccacgacaggggaggaaaaggucauguuacagauggggcagcacugguucuugucuuugcuucugcugcucuucugaucugagucuagcuucuucguuucccccuuuaaugucuccauuccauggauugcuagguaucucuucacuuuguuggcauguuuuuugcucugguaaugugccagcuucugggacucagaaauaagcaaggcgcagcaaaccuuacacuggguguuggugaagagacauugguucuucuggaucaugugcuccacugugcgacauucauugcagauaaauuuuccucuuggcaucucagucaauccaaggcacuccagguggaaagccccacagcacugagccucacauaacagcagcucacccaauuuuucacaauucugacagacauucuccuugagugcagcuccuccaccgcguucacccugcauuuuuuuagaggcaggcaucccgggaucguguucuacaccuuccucaacagucuccuuggggcuuguggccguccugugaggcauuaguucucccucugagccuggaaucucuuuugacgagucaucauuuuucacuuuuuuacacugcaucuuggcugcagcaugccucugucguuuucgcuuccuuggcuugucaaauaucuugguagugccuccaccaaaaucuuuugaauaagauguggcacaagauucaguuaugccauucuccaggugaccagcuucauagcacuuuuuagaaaggccaaggucccccuucuugggcauaaauccagggucuaaaucauuggauucaagaaguuucuuaguugguuuucuuugacguuuacuuucauaauuuccuggcguuuuaacuagcaauuccucagacucaagggcaggccguggagagacuuccggagccacaggcacagacaaggucagcugcggcaacucagcauguccaccuccaaguucugacugagccaaggggcccuccaaaaacggagccucccuuucaagaacuggaggcucuucuuugguugaaaucaaagaauucucguccaccugcuuguucugagcacuagaucgaccucgggcuagaaggcuuuccucuucacagcgggaacuuaccuugugcaccugcuccuguaccuucuuuuguuuuuucuuaggagcaaauaucugaucauauucuucuguauauuccaaaagccacuugcuuggcuuccuaaggcguuucuucucugaccgcacagcugguucagggagcucagccuguggugucaaacugggaauuccuggcuccuuuuccaugucaccaaugcuggcacuggauuuaucacaaacauuuaaccguggcccagcugaaucuaagcagucagcaugauuuugcucugucagugguuccucaaguaugcuugcugaaggaguucuaugcucuggaaacucaucccgccccuccugcacagggucacuaggaaguaagacccuaaaggcacacucagaguuuucuuucucuuuaaaucuguucaugcgcuuacgagguuuagugcgccuuugguuuaaacgcugccaccgcuuuuuaggcaccacuugauuuacaccauugaguucaucauucucacuguucauuacagaguccagcucugggccuuuuccguuuucaaaagagaguccuuuuucagaaauuuuaccaggaucagauugcuuaaccuugcuaucgaaaugcacaucagaaaaauggucaccaucuucacuuguuaaguggcccauuaucugaaggggauccucuuuacuaggaucuucugccccaccucucaaugaaccuccacguucucggucucccugcaguacagcaucaagagucacacuuggaagcugauucaguuuucuuuugcgcucggucuuuaaggcuuuacgguucacuguguucuuuaccauuugggcugaaaaagcaucucgcaauuuggaugaaggcuuugaucguccacaguugcgccuaguaacacagucugaacgacuuuuaccagaagcagggaggucucucuugucggacaguaagccagguagggaagcagacaacucgccagauaaugcagagucacccccacuagggcuaggauuggcggaguucugagugccaucucccuuuuucucugaauuguguguggagccuccugaaaccaaaaccuuagagacuccuacaggacuauuaguagaacaguccccacgaccaggacuccgguaagagaccagguuuugagcagucaucaaccgcugcuccuucgucuuacuaucaugcauaucuuucaacaucauuagcaauguacugaauuuguagucugguucaauagguaugugauucugacuagaagcagaagagaaaaguaaugguuuugauggcuuugauguuccagagucacugacauccucaccuaaggaucuguaagagaguuccuucaacucggauaaaacauguuucaccacugcuguuucuaugucacuugaaucccugguuuucucaugcauauuguucaguaguuuuagaccauccacuuucccacuuuuagaaaugcuggccaaaggagagccuuugguaucagaagagcagcauuucaaacugcacuccucauuuauaacuggggguucugccauaacuggauuuucuuuguguuugcacuuuauacuucggaacuugggcuguuugcuuuucgaauguaauagagcuugauuugcugccccacccuuuauuaacgaguucucacuggauaugcuugaugacagguugaauuuuggagagagagcaucauuuguaaaaucugacugggguuugugaacaagaguagaugccuucagaucagagagauuaaccugagacgucucgguuccaggcucugcacucuuaguacaacccauuaaguggucuguaugugaguuacuaaugagaggcuucuguuuugcuuuuacccuaguguuuguggcagcaaaccuagaauacuuuaucuuuucauuuuucugcauagauaacauguucucuguucuaucgaaagcaucuggaauuucaaggacacuguuaucagacucugagcuguguucuaugggauccaggucacugcuuccaucaucagaagugguacagauacuaauggaaucacuucgcuuuuccucaucaccugcuccaauauagcagagcuucacuuuugaaccacacaccaggcuucguugggguuuauucuucucucgagaacacuuugagaucaaagcacccucaggcaagcccaauaaagagucaccauuugaagucucaaauucuuucuuugcaguguuuuuuccacaggaagaaaacagaaaacuuccuggggcaguguuggacccugugaggcuauuugcuauccuggaaaguucauuagaggccugcguaucagauauauccccagagauaaaguuuaggccaagguucucuggaaucuuuccccuccguucaucuuuaugugcuucaaauuguauguggcccuuuuucacacuaguccuuuuuggauuaucagagcucuuucuggcucgagauuuagcgcaaggcuuuuccuucucaucugcagaauguucagaaucaaaagccagugauuucaaacagccauuaagcaacaggucauguucugacucaggaucauuugugcagucuucaaauggcauaucuucuucacuguccaacuugauugaaccaggaauacauuuucgguucuuugaccccuugggaacaucauacuguucugcaaguccaacacuggcuucccauuuacucaaaauuuucugaggaacaaauggcaauuccugugaaguagaugaugaugaaguuccagguaauucuagcauguuuccuaauguacugguacuggaaucuggaucauccugaaaagauaaauuuauugaguuuaauugcucuucuauuguaauguuugugucuccuagugaaaagggggcugggagaagggcugcuuuuucauugcugccguccacuucauuucuuugcuuauuuuucuguguuucagucugaggagcuaauggcaagaauggcgauuugacugcaccgugucuacucucuggugugcugucuuguucacuucccauggccacuuuuacaccauucucugauuuagucucauaauugcagguggcauuggucugaguuuccucaaagaucuccucuauacucucauccucugugacuggcuguucuggguccauuucagaaucuacaucugcaucguccacacaaguaaaauucucaaagugcagaaagccauucuugauagucuuuguuacuuuuaccuggaguucaggggaguuauuacaagaggguuccuguuucauagcaagugcuguaggaccaccaggacucaaggaagugcaaacaauuggcgucugagcucuugaaucacuuuuuucagggucuugaaaggauucugauccaucagcagacccauuuaaauacucuacauugaucauggaggccaaauccuguagucuccgcaguggaauguaacaagauggagaaucuuguccauaagcauuuugggauguuccacugacagucgauaacugcauaguacacccauuaaguggcucagaaaaauuggauugaccauuaccgaaagggcuguccuugucuucaggggcaucuaaauucacuggauuggaaaagggcagcagacaauuucuucuggguaguucacaggucugauccauccugggccggcaucaac

SEQ ID NO: 2012 - RNA, 7662 nt, Homo sapiens
uuagauagagucuuguuauguugcccuggcuggagugcagugguuauucacaggcaugaucacagcauacuucaggcuggaacuccugggcuugaauggucuuucugccuuagccuccugagcagcugggacuauaggugcaugacgccgcaccuggccauaacacuccuucucagcucauuuuugagucaugaaaaaugcucuuucaagaaucaccaggccuaugauaagucccauggaacaaaccuaucacuguguaagagcugagcaggagaaaaccaucucuccucauacaccucauuuguucauucaauaaaaauucaugacacaccacuauggacaucaggaaguagagaugaauaaggcugggucucugcccuaagugauuagccuggaaagccauacuggacacaguguccauacuggccuccuugucuccuuuccugccccucccugcacuccuuuacauaacagccagaacaguucucucaaacauaaagcagauccccagcuuaaacccuuuaaagaccuucaugaggcccuaugugacaggagaagcaggagaaggugguggaugagaagaugaggcuguacugaguucagggcaccugaacucaagggagacuuucacagggugcucgacucugucccaacuccuaaagugacuacuggggacuacugaggucugaauggggugggggugaggggucaagacagacauacuagauccaauggcaauauggcucaaaacccuaggucuguuaaguuguagucuggcccaugagggaaauucuuuauuuggaugcuucagugaccaagagacagagcauuaggcacacacagaagcacacacauacacacaaacacacacacacacacacacacauccacacacaauaugcaaagcaaaggcauuucacaggugaagggauagggagugggggaaggaggccacgagagcagcuaggggcuucuuugacacaaugaagagaagccucugauggugacacuccuuggaauucucgucucaagguuacaaggaaaaaucuauccguguggacucagucccaggccauaaaacacagcaaagauagagaaaucuggguguggggccugggaaacgccuguuccucacuguagaaaccugcaucagcucucucuuucuuucccugggacccagaaaucacccgguggaugauggggaaggcuagcaccacagcaaacugggcaagugguccgcugcacaagggggaagagagggcuaguagggccgaggguagcaaugaaccucacagcuagcgggcaugaggcagucugccuuuaggggcagaacccucagggagacuugcauguggggcacuuucccguguaaccuagggucagagcaccucugauggaggaggggaaaggucccauccccauuggaguguccuaugaucucaguggacauggaggccgcccccagccccagcucguugccaacugcugcagauccuuagcaccauucaggaacuguggagggggcagcggggguagcaaugcuccgccaagauugugucacugcuccaggaggauacuucacaguuggcagaaaccugcgcaacuggccauaucuggucuaagacucaggaaagccugcaccuucugggggaaggcagagugucguauuagcuccaagcucccauguugcagccauuuccucuguuuccugcccugccccagguuuggcaugaaaguuccagguuuugcuggaaaugucuagggcccagagagaucucugcucuuuaguugcaagaacuggcccaaaacugaccuuuagaggaaagacagguggcaggggccucagcaccuaaggcccagagggguugggaaauggggaaagccacccuccaaacuaccaccccgcgagaccccgagucucucaauacccuugccuccccugucaugaccuacaggaccccugccaaaggggagcagcaggagugaauuagcccggaccaaugagaggcugucuguggcccaauccugccucaggcccguguacuuuccuggugagaacaacgagcaagagggagccaagggcugagcagucacgggaagcuggcucauggcuggcccaauaugggaugcugggcagaaucaccucuagucuuccaaggugguugagucuuucugaauggguugccuuugcauuggaaucuggcccagggaugaugccacuguuuuuggugacugguucuuguguuugaagccgcugacaugagcuugguacuguucuauggaguucagcacuaucuuacauguuuugcagggguagcccuuuccagcuggaaagucagugacagcaggguccgccagccgcccauagcgugccauuaguuugagcuuggucuccuguuuucuguguuucuugcccacauaauguuguugagccaugacagggucguugaaaguugcauggcagaggcugcagaacuugucugggucuaucaucucucuauucuggugcaaggcuuccaccuuaguggacugcugcuucagcuuuaaguucuuugcgugggucuuccccagguagugcgacugggccacgacaggggaggaaaaggucauguuacagauggggcagcacugguucuugucuuugcuucugcugcucugguaaugugccagcuucugggacucagaaauaagcaaggcgcagcaaaccuuacacuggguguuggugaagagacauugguucuucuggaucaugugcuccacugugcgacauucauugcagauaaauuuuccucuuggcaucucagucaauccaaggcacuccagguggaaagccccacagcacugagccucacauaacagcagcucacccaauuuuucacaauucugacagacauucuccuugagugcagcuccuccaccgcguucacccugcauuuuuuuagaggcaggcaucccgggaucguguucuacaccuuccucaacagucuccuuggggcuuguggccguccugugaggcauuaguucucccucugagccuggaaucucuuuugacgagucaucauuuuucacuuuuuuacacugcaucuuggcugcagcaugccucugucguuuucgcuuccuuggcuugucaaauaucuugguagugccuccaccaaaaucuuuugaauaagauguggcacaagauucaguuaugccauucuccaggugaccagcuucauagcacuuuuuagaaaggccaaggucccccuucuugggcauaaauccagggucuaaaucauuggauucaagaaguuucuuaguugguuuucuuugacguuuacuuucauaauuuccuggcguuuuaacuagcaauuccucagacucaagggcaggccguggagagacuuccggagccacaggcacagacaaggucagcugcggcaacucagcauguccaccuccaaguucugacugagccaaggggcccuccaaaaacggagccucccuuucaagaacuggaggcucuucuuugguugaaaucaaagaauucucguccaccugcuuguucugagcacuagaucgaccucgggcuagaaggcuuuccucuucacagcgggaacuuaccuugugcaccugcuccuguaccuucuuuuguuuuuucuuaggagcaaauaucugaucauauucuucuguauauuccaaaagccacuugcuuggcuuccuaaggcguuucuucucugaccgcacagcugguucagggagcucagccuguggugucaaacugggaauuccuggcuccuuuuccaugucaccaaugcuggcacuggauuuaucacaaacauuuaaccguggcccagcugaaucuaagcagucagcaugauuuugcucugucagugguuccucaaguaugcuugcugaaggaguucuaugcucuggaaacucaucccgccccuccugcacagggucacuaggaaguaagacccuaaaggcacacucagaguuuucuuucucuuuaaaucuguucaugcgcuuacgagguuuagugcgccuuugguuuaaacgcugccaccgcuuuuuaggcaccacuugauuuacaccauugaguucaucauucucacuguucauuacagaguccagcucugggccuuuuccguuuucaaaagagaguccuuuuucagaaauuuuaccaggaucagauugcuuaaccuugcuaucgaaaugcacaucagaaaaauggucaccaucuucacuuguuaaguggcccauuaucugaaggggauccucuuuacuaggaucuucugccccaccucucaaugaaccuccacguucucggucucccugcaguacagcaucaagagucacacuuggaagcugauucaguuuucuuuugcgcucggucuuuaaggcuuuacgguucacuguguucuuuaccauuugggcugaaaaagcaucucgcaauuuggaugaaggcuuugaucguccacaguugcgccuaguaacacagucugaacgacuuuuaccagaagcagggaggucucucuugucggacaguaagccagguagggaagcagacaacucgccagauaaugcagagucacccccacuagggcuaggauuggcggaguucugagugccaucucccuuuuucucugaauuguguguggagccuccugaaaccaaaaccuuagagacuccuacaggacuauuaguagaacaguccccacgaccaggacuccgguaagagaccagguuuugagcagucaucaaccgcugcuccuucgucuuacuaucaugcauaucuuucaacaucauuagcaauguacugaauuuguagucugguucaauagguaugugauucugacuagaagcagaagagaaaaguaaugguuuugauggcuuugauguuccagagucacugacauccucaccuaaggaucuguaagagaguuccuucaacucggauaaaacauguuucaccacugcuguuucuaugucacuugaaucccugguuuucucaugcauauuguucaguaguuuuagaccauccacuuucccacuuuuagaaaugcuggccaaaggagagccuuugguaucagaagagcagcauuucaaacugcacuccucauuuauaacuggggguucugccauaacuggauuuucuuuguguuugcacuuuauacuucggaacuugggcuguuugcuuuucgaauguaauagagcuugauuugcugccccacccuuuauuaacgaguucucacuggauaugcuugaugacagguugaauuuuggagagagagcaucauuuguaaaaucugacugggguuugugaacaagaguagaugccuucagaucagagagauuaaccugagacgucucgguuccaggcucugcacucuuaguacaacccauuaaguggucuguaugugaguuacuaaugagaggcuucuguuuugcuuuuacccuaguguuuguggcagcaaaccuagaauacuuuaucuuuucauuuuucugcauagauaacauguucucuguucuaucgaaagcaucuggaauuucaaggacacuguuaucagacucugagcuguguucuaugggauccaggucacugcuuccaucaucagaagugguacagauacuaauggaaucacuucgcuuuuccucaucaccugcuccaauauagcagagcuucacuuuugaaccacacaccaggcuucguugggguuuauucuucucucgagaacacuuugagaucaaagcacccucaggcaagcccaauaaagagucaccauuugaagucucaaauucuuucuuugcaguguuuuuuccacaggaagaaaacagaaaacuuccuggggcaguguuggacccugugaggcuauuugcuauccuggaaaguucauuagaggccugcguaucagauauauccccagagauaaaguuuaggccaagguucucuggaaucuuuccccuccguucaucuuuaugugcuucaaauuguauguggcccuuuuucacacuaguccuuuuuggauuaucagagcucuuucuggcucgagauuuagcgcaaggcuuuuccuucucaucugcagaauguucagaaucaaaagccagugauuucaaacagccauuaagcaacaggucauguucugacucaggaucauuugugcagucuucaaauggcauaucuucuucacuguccaacuugauugaaccaggaauacauuuucgguucuuugaccccuugggaacaucauacuguucugcaaguccaacacuggcuucccauuuacucaaaauuuucugaggaaccuuaugccuauauccuuuuucuuucuguuucccucuucuccuaaggacagguagcucuucgaauugaugucugccuucaaacaugacgauugcuuuuccagccacccaggcucucucagaaggaucuccaaaagccuccacguaguacugccgauagggccuccgguuggaaacuuucauuuuugaauguguguuaaucaacggaucagaacaaauccugcagggccaccaugggcgucucuugaauuuugcccagaugagaucuccaacuucauacuucaguggcguagacuuuuucuuagguugacaaaauggcaauuccugugaaguagaugaugaugaaguuccagguaauucuagcauguuuccuaauguacugguacuggaaucuggaucauccugaaaagauaaauuuauugaguuuaauugcucuucuauuguaauguuugugucuccuagugaaaagggggcugggagaagggcugcuuuuucauugcugccguccacuucauuucuuugcuuauuuuucuguguuucagucugaggagcuaauggcaagaauggcgauuugacugcaccgugucuacucucuggugugcugucuuguucacuucccauggccacuuuuacaccauucucugauuuagucucauaauugcagguggcauuggucugaguuuccucaaagaucuccucuauacucucauccucugugacuggcuguucuggguccauuucagaaucuacaucugcaucguccacacaaguaaaauucucaaagugcagaaagccauucuugauagucuuuguuacuuuuaccuggaguucaggggaguuauuacaagaggguuccuguuucauagcaagugcuguaggaccaccaggacucaaggaagugcaaacaauuggcgucugagcucuugaaucacuuuuuucagggucuugaaaggauucugauccaucagcagacccauuuaaauacucuacauugaucauggaggccaaauccuguagucuccgcaguggaauguaacaagauggagaaucuuguccauaagcauuuugggauguuccacugacagucgauaacugcauaguacacccauuaaguggcucagaaaaauuggauugaccauuaccgaaagggcuguccuugucuucaggggcaucuaaauucacuggauuggaaaagggcagcagacaauuucuucuggguaguucacaggucugauccauccugggccggcaucaaccgugccccgcgcccccucccgggccagcuggggggagggggugacccucauuacacuggggugcgagcggagcgguggggagagagcggggccgcucgccgcaccccccuccccccgcguc

SEQ ID NO: 2013 - RNA, 5948 nt, Homo sapiens
aaacaaguuuuauuuugagaacauuuuaaaauacagaaaaaguacacagggucauaccauacccagcugcucagaauugacaauuguucauuaccauuucuuuuuuuuaaguugaaacagggucucauuauguugcccaggcuggucuugaacuccugggcucaagcaaucugccugucucggccuccaaaagugcugggaguacaggcuugagccaccgcaccuggccuauuuuaucauucuuuuccaacccuuuucuaccuuggcuucuccacaggcuccagggaggucuagcuuggcuggucaaaacggaggugacauugacagaaagugagugauuaaagguugggugucagagucggacagaucuggguuuuuuuuggagacagagucuuacucugucgcucaggcuggaaugcaguggcacgaucuaggcucacugcaaccaccaccuccuggguucaagugauucuccugccucagccaccugaguagcugggauuacgggugugugccaccacgcccagcuaauuuuuguauuuuugguagagacgggguuuugccauuguuggccaggcuugaacuccuggccacaggagaucugcuggccucagucucccaaagggcugggauuauaggugugagccaccuugcccagugacagaucuggguuugagucccgaaaacucuuuguggucacggacaaaucacuuaaccucaagccucaguuucaucuucugugaaaugggaauaauacaucuuccgugaggacucaguaugaugauguaugucaagcacaaugccagugccuggcauauaccccuugcucacugaagaguagccaauaugaauauuugcagcuaugggccugggacccacccaaaagcaugggcaacacccuccugugaccgaaagggagggacugugagaaugaccccuccucagccuucauuucuccucauuucccacccguccucaauucuggguacaucugucuccaguuuauacucugaagacagcagggcugugaguuacagguugcccagggcauuuuuguggaggcagagaguuuagagcugaugacagccugggagagcucuggggaggcuuccaaaccaaaguggauggaggggaacuggggaggagggaucugagugagguuagucccggcuaaccucacucaguucuaacuacccugggcugguccuggggcuucucacagccucaguagcaccccccguccccuuauucacuggucucggauacucuagaccuguggccuggcuugcuaggacaggggcuuucaggcuuugccagacucagccucucuagacuugggccuacaagccucacacccaccggguguuggcaugcacgucuguuuggaggaggaccgacagcugggaaguggcagaggcugggcuggaagggugagaggguugguggucuccagggaagcgggaaguaaacucgugcccuucuguacuuugcccggugcccuggaccauggaggguuucguuggggugugaauaacagaaaccuaagugagcagggccuaaaugaaacaguguauccaucucucacuuagccccacguccagagguggguguagguuggucugaagucaggguugaggacucguccguucuccagguuuuucucucauggucgcaagauguuggcuucagcugcugccgucacauuugugcagaggcaggaggaaggaagaaguuccagagaguugaguuuccacacagcaacucccaauuucauuuccuuggccagacugugacacggccaccccuagcucuagucuuccaaggugguugagucuuucugaauggguugccuuugcauuggaaucuggcccagggaugaugccacuguuuuuggugacugguucuuguguuugaagccgcugacaugagcuugguacuguucuauggaguucagcacuaucuuacauguuuugcagggguagcccuuuccagcuggaaagucagugacagcaggguccgccagccgcccauagcgugccauuaguuugagcuuggucuccuguuuucuguguuucuugcccacauaauguuguugagccaugacagggucguugaaaguugcauggcagaggcugcagaacuugucugggucuaucaucucucuauucuggugcaaggcuuccaccuuaguggacugcugcuucagcuuuaaguucuuugcgugggucuuccccagguagugcgacugggccacgacaggggaggaaaaggucauguuacagauggggcagcacugguucuugucuuugcuucugcugcucuucugaucugagucuagcuucuucguuucccccuuuaaugucuccauuccauggauugcuagguaucucuucacuuuguuggcauguuuuuugcucugguaaugugccagcuucugggacucagaaauaagcaaggcgcagcaaaccuuacacuggguguuggugaagagacauugguucuucuggaucaugugcuccacugguucagggagcucagccuguggugucaaacugggaauuccuggcuccuuuuccaugucaccaaugcuggcacuggauuuaucacaaacauuuaaccguggcccagcugaaucuaagcagucagcaugauuuugcucugucagugguuccucaaguaugcuugcugaaggaguucuaugcucuggaaacucaucccgccccuccugcacagggucacuaggaaguaagacccuaaaggcacacucagaguuuucuuucucuuuaaaucuguucaugcgcuuacgagguuuagugcgccuuugguuuaaacgcugccaccgcuuuuuaggcaccacuugauuuacaccauugaguucaucauucucacuguucauuacagaguccagcucugggccuuuuccguuuucaaaagagaguccuuuuucagaaauuuuaccaggaucagauugcuuaaccuugcuaucgaaaugcacaucagaaaaauggucaccaucuucacuuguuaaguggcccauuaucugaaggggauccucuuuacuaggaucuucugccccaccucucaaugaaccuccacguucucggucucccugcaguacagcaucaagagucacacuuggaagcugauucaguuuucuuuugcgcucggucuuuaaggcuuuacgguucacuguguucuuuaccauuugggcugaaaaagcaucucgcaauuuggaugaaggcuuugaucguccacaguugcgccuaguaacacagucugaacgacuuuuaccagaagcagggaggucucucuugucggacaguaagccagguagggaagcagacaacucgccagauaaugcagagucacccccacuagggcuaggauuggcggaguucugagugccaucucccuuuuucucugaauuguguguggagccuccugaaaccaaaaccuuagagacuccuacaggacuauuaguagaacaguccccacgaccaggacuccgguaagagaccagguuuugagcagucaucaaccgcugcuccuucgucuuacuaucaugcauaucuuucaacaucauuagcaauguacugaauuuguagucugguucaauagguaugugauucugacuagaagcagaagagaaaaguaaugguuuugauggcuuugauguuccagagucacugacauccucaccuaaggaucuguaagagaguuccuucaacucggauaaaacauguuucaccacugcuguuucuaugucacuugaaucccugguuuucucaugcauauuguucaguaguuuuagaccauccacuuucccacuuuuagaaaugcuggccaaaggagagccuuugguaucagaagagcagcauuucaaacugcacuccucauuuauaacuggggguucugccauaacuggauuuucuuuguguuugcacuuuauacuucggaacuugggcuguuugcuuuucgaauguaauagagcuugauuugcugccccacccuuuauuaacgaguucucacuggauaugcuugaugacagguugaauuuuggagagagagcaucauuuguaaaaucugacugggguuugugaacaagaguagaugccuucagaucagagagauuaaccugagacgucucgguuccaggcucugcacucuuaguacaacccauuaaguggucuguaugugaguuacuaaugagaggcuucuguuuugcuuuuacccuaguguuuguggcagcaaaccuagaauacuuuaucuuuucauuuuucugcauagauaacauguucucuguucuaucgaaagcaucuggaauuucaaggacacuguuaucagacucugagcuguguucuaugggauccaggucacugcuuccaucaucagaagugguacagauacuaauggaaucacuucgcuuuuccucaucaccugcuccaauauagcagagcuucacuuuugaaccacacaccaggcuucguugggguuuauucuucucucgagaacacuuugagaucaaagcacccucaggcaagcccaauaaagagucaccauuugaagucucaaauucuuucuuugcaguguuuuuuccacaggaagaaaacagaaaacuuccuggggcaguguuggacccugugaggcuauuugcuauccuggaaaguucauuagaggccugcguaucagauauauccccagagauaaaguuuaggccaagguucucuggaaucuuuccccuccguucaucuuuaugugcuucaaauuguauguggcccuuuuucacacuaguccuuuuuggauuaucagagcucuuucuggcucgagauuuagcgcaaggcuuuuccuucucaucugcagaauguucagaaucaaaagccagugauuucaaacagccauuaagcaacaggucauguucugacucaggaucauuugugcagucuucaaauggcauaucuucuucacuguccaacuugauugaaccaggaauacauuuucgguucuuugaccccuugggaacaucauacuguucugcaaguccaacacuggcuucccauuuacucaaaauuuucugaggaaccuuaugccuauauccuuuuucuuucuguuucccucuucuccuaaggacagguagcucuucgaauugaugucugccuucaaacaugacgauugcuuuuccagccacccaggcucucucagaaggaucuccaaaagccuccacguaguacugccgauagggccuccgguuggaaacuuucauuuuugaauguguguuaaucaacggaucagaacaaauccugcagggccaccaugggcgucucuugaauuuugcccagaugagaucuccaacuucauacuucaguggcguagacuuuuucuuagguugacacccucacaaccuuacaagacagcauuaucucgauuuugcagauaaagaaacugaggcucaaaaagguuaagucacaggcugggugcgguggcucaugccuguaaucccagcacuuugggaggccaaggugggagaaucacuggaggucaggaguucaagaccagccuggcaaacauggugaaaccccaucucuacuaaaaauacaaagauuagccgagcaugguggugugugccuguaaucccagcuacuugggagguugaggcagaagaaucgcuugaaccugggaggcggagguugcagugagccaagaucuuaccacugcauuccagccugggcaacggagugagauuccagaaauggcaauuccugugaaguagaugaugaugaaguuccagguaauucuagcauguuuccuaauguacugguacuggaaucuggaucauccgaaagggcuguccuugucuucaggggcaucuaaauucacuggauuggaaaagggcagcagacaauuucuucuggguaguucacaggucugauccauccugggccggcaucaac

SEQ ID NO: 2014 - RNA, 6263 nt, Homo sapiens
uuagauagagucuuguuauguugcccuggcuggagugcagugguuauucacaggcaugaucacagcauacuucaggcuggaacuccugggcuugaauggucuuucugccuuagccuccugagcagcugggacuauaggugcaugacgccgcaccuggccauaacacuccuucucagcucauuuuugagucaugaaaaaugcucuuucaagaaucaccaggccuaugauaagucccauggaacaaaccuaucacuguguaagagcugagcaggagaaaaccaucucuccucauacaccucauuuguucauucaauaaaaauucaugacacaccacuauggacaucaggaaguagagaugaauaaggcugggucucugcccuaagugauuagccuggaaagccauacuggacacaguguccauacuggccuccuugucuccuuuccugccccucccugcacuccuuuacauaacagccagaacaguucucucaaacauaaagcagauccccagcuuaaacccuuuaaagaccuucaugaggcccuaugugacaggagaagcaggagaaggugguggaugagaagaugaggcuguacugaguucagggcaccugaacucaagggagacuuucacagggugcucgacucugucccaacuccuaaagugacuacuggggacuacugaggucugaauggggugggggugaggggucaagacagacauacuagauccaauggcaauauggcucaaaacccuaggucuguuaaguuguagucuggcccaugagggaaauucuuuauuuggaugcuucagugaccaagagacagagcauuaggcacacacagaagcacacacauacacacaaacacacacacacacacacacacauccacacacaauaugcaaagcaaaggcauuucacaggugaagggauagggagugggggaaggaggccacgagagcagcuaggggcuucuuugacacaaugaagagaagccucugauggugacacuccuuggaauucucgucucaagguuacaaggaaaaaucuauccguguggacucagucccaggccauaaaacacagcaaagauagagaaaucuggguguggggccugggaaacgccuguuccucacuguagaaaccugcaucagcucucucuuucuuucccugggacccagaaaucacccgguggaugauggggaaggcuagcaccacagcaaacugggcaagugguccgcugcacaagggggaagagagggcuaguagggccgaggguagcaaugaaccucacagcuagcgggcaugaggcagucugccuuuaggggcagaacccucagggagacuugcauguggggcacuuucccguguaaccuagggucagagcaccucugauggaggaggggaaaggucccauccccauuggaguguccuaugaucucaguggacauggaggccgcccccagccccagcucguugccaacugcugcagauccuuagcaccauucaggaacuguggagggggcagcggggguagcaaugcuccgccaagauugugucacugcuccaggaggauacuucacaguuggcagaaaccugcgcaacuggccauaucuggucuaagacucaggaaagccugcaccuucugggggaaggcagagugucguauuagcuccaagcucccauguugcagccauuuccucuguuuccugcccugccccagguuuggcaugaaaguuccagguuuugcuggaaaugucuagggcccagagagaucucugcucuuuaguugcaagaacuggcccaaaacugaccuuuagaggaaagacagguggcaggggccucagcaccuaaggcccagagggguugggaaauggggaaagccacccuccaaacuaccaccccgcgagaccccgagucucucaauacccuugccuccccugucaugaccuacaggaccccugccaaaggggagcagcaggagugaauuagcccggaccaaugagaggcugucuguggcccaauccugccucaggcccguguacuuuccuggugagaacaacgagcaagagggagccaagggcugagcagucacgggaagcuggcucauggcuggcccaauaugggaugcugggcagaaucaccucuagucuuccaaggugguugagucuuucugaauggguugccuuugcauuggaaucuggcccagggaugaugccacuguuuuuggugacugguucuuguguuugaagccgcugacaugagcuugguacuguucuauggaguucagcacuaucuuacauguuuugcagggguagcccuuuccagcuggaaagucagugacagcaggguccgccagccgcccauagcgugccauuaguuugagcuuggucuccuguuuucuguguuucuugcccacauaauguuguugagccaugacagggucguugaaaguugcauggcagaggcugcagaacuugucugggucuaucaucucucuauucuggugcaaggcuuccaccuuaguggacugcugcuucagcuuuaaguucuuugcgugggucuuccccagguagugcgacugggccacgacaggggaggaaaaggucauguuacagauggggcagcacugguucuugucuuugcuucugcugcucugguaaugugccagcuucugggacucagaaauaagcaaggcgcagcaaaccuuacacuggguguuggugaagagacauugguucuucuggaucaugugcuccacugguucagggagcucagccuguggugucaaacugggaauuccuggcuccuuuuccaugucaccaaugcuggcacuggauuuaucacaaacauuuaaccguggcccagcugaaucuaagcagucagcaugauuuugcucugucagugguuccucaaguaugcuugcugaaggaguucuaugcucuggaaacucaucccgccccuccugcacagggucacuaggaaguaagacccuaaaggcacacucagaguuuucuuucucuuuaaaucuguucaugcgcuuacgagguuuagugcgccuuugguuuaaacgcugccaccgcuuuuuaggcaccacuugauuuacaccauugaguucaucauucucacuguucauuacagaguccagcucugggccuuuuccguuuucaaaagagaguccuuuuucagaaauuuuaccaggaucagauugcuuaaccuugcuaucgaaaugcacaucagaaaaauggucaccaucuucacuuguuaaguggcccauuaucugaaggggauccucuuuacuaggaucuucugccccaccucucaaugaaccuccacguucucggucucccugcaguacagcaucaagagucacacuuggaagcugauucaguuuucuuuugcgcucggucuuuaaggcuuuacgguucacuguguucuuuaccauuugggcugaaaaagcaucucgcaauuuggaugaaggcuuugaucguccacaguugcgccuaguaacacagucugaacgacuuuuaccagaagcagggaggucucucuugucggacaguaagccagguagggaagcagacaacucgccagauaaugcagagucacccccacuagggcuaggauuggcggaguucugagugccaucucccuuuuucucugaauuguguguggagccuccugaaaccaaaaccuuagagacuccuacaggacuauuaguagaacaguccccacgaccaggacuccgguaagagaccagguuuugagcagucaucaaccgcugcuccuucgucuuacuaucaugcauaucuuucaacaucauuagcaauguacugaauuuguagucugguucaauagguaugugauucugacuagaagcagaagagaaaaguaaugguuuugauggcuuugauguuccagagucacugacauccucaccuaaggaucuguaagagaguuccuucaacucggauaaaacauguuucaccacugcuguuucuaugucacuugaaucccugguuuucucaugcauauuguucaguaguuuuagaccauccacuuucccacuuuuagaaaugcuggccaaaggagagccuuugguaucagaagagcagcauuucaaacugcacuccucauuuauaacuggggguucugccauaacuggauuuucuuuguguuugcacuuuauacuucggaacuugggcuguuugcuuuucgaauguaauagagcuugauuugcugccccacccuuuauuaacgaguucucacuggauaugcuugaugacagguugaauuuuggagagagagcaucauuuguaaaaucugacugggguuugugaacaagaguagaugccuucagaucagagagauuaaccugagacgucucgguuccaggcucugcacucuuaguacaacccauuaaguggucuguaugugaguuacuaaugagaggcuucuguuuugcuuuuacccuaguguuuguggcagcaaaccuagaauacuuuaucuuuucauuuuucugcauagauaacauguucucuguucuaucgaaagcaucuggaauuucaaggacacuguuaucagacucugagcuguguucuaugggauccaggucacugcuuccaucaucagaagugguacagauacuaauggaaucacuucgcuuuuccucaucaccugcuccaauauagcagagcuucacuuuugaaccacacaccaggcuucguugggguuuauucuucucucgagaacacuuugagaucaaagcacccucaggcaagcccaauaaagagucaccauuugaagucucaaauucuuucuuugcaguguuuuuuccacaggaagaaaacagaaaacuuccuggggcaguguuggacccugugaggcuauuugcuauccuggaaaguucauuagaggccugcguaucagauauauccccagagauaaaguuuaggccaagguucucuggaaucuuuccccuccguucaucuuuaugugcuucaaauuguauguggcccuuuuucacacuaguccuuuuuggauuaucagagcucuuucuggcucgagauuuagcgcaaggcuuuuccuucucaucugcagaauguucagaaucaaaagccagugauuucaaacagccauuaagcaacaggucauguucugacucaggaucauuugugcagucuucaaauggcauaucuucuucacuguccaacuugauugaaccaggaauacauuuucgguucuuugaccccuugggaacaucauacuguucugcaaguccaacacuggcuucccauuuacucaaaauuuucugaggaacaaauggcaauuccugugaaguagaugaugaugaaguuccagguaauucuagcauguuuccuaauguacugguacuggaaucuggaucauccugaaaagauaaauuuauugaguuuaauugcucuucuauuguaauguuugugucuccuagugaaaagggggcugggagaagggcugcuuuuucauugcugccguccacuucauuucuuugcuuauuuuucuguguuucagucugaggagcuaauggcaagaauggcgauuugacugcaccgugucuacucucuggugugcugucuuguucacuucccauggccacuuuuacaccauucucugauuuagucucauaauugcagguggcauuggucugaguuuccucaaagaucuccucuauacucucauccucugugacuggcuguucuggguccauuucagaaucuacaucugcaucguccacacaaguaaaauucucaaagugcagaaagccauucuugauagucuuuguuacuuuuaccuggaguucaggggaguuauuacaagaggguuccuguuucauagcaagugcuguaggaccaccaggacucaaggaagugcaaacaauuggcgucugagcucuugaaucacuuuuuucagggucuugaaaggauucugauccaucagcagacccauuuaaauacucuacauugaucauggaggccaaauccuguagucuccgcaguggaauguaacaagauggagaaucuuguccauaagcauuuugggauguuccacugacagucgauaacugcauaguacacccauuaaguggcucagaaaaauuggauugaccauuaccgaaagggcuguccuugucuucaggggcaucuaaauucacuggauuggaaaagggcagcagacaauuucuucuggguaguucacaggucugauccauccugggccggcaucaac

SEQ ID NO: 2015 - RNA, 6454 nt, Homo sapiens
aaacaaguuuuauuuugagaacauuuuaaaauacagaaaaaguacacagggucauaccauacccagcugcucagaauugacaauuguucauuaccauuucuuuuuuuuaaguugaaacagggucucauuauguugcccaggcuggucuugaacuccugggcucaagcaaucugccugucucggccuccaaaagugcugggaguacaggcuugagccaccgcaccuggccuauuuuaucauucuuuuccaacccuuuucuaccuuggcuucuccacaggcuccagggaggucuagcuuggcuggucaaaacggaggugacauugacagaaagugagugauuaaagguugggugucagagucggacagaucuggguuuuuuuuggagacagagucuuacucugucgcucaggcuggaaugcaguggcacgaucuaggcucacugcaaccaccaccuccuggguucaagugauucuccugccucagccaccugaguagcugggauuacgggugugugccaccacgcccagcuaauuuuuguauuuuugguagagacgggguuuugccauuguuggccaggcuugaacuccuggccacaggagaucugcuggccucagucucccaaagggcugggauuauaggugugagccaccuugcccagugacagaucuggguuugagucccgaaaacucuuuguggucacggacaaaucacuuaaccucaagccucaguuucaucuucugugaaaugggaauaauacaucuuccgugaggacucaguaugaugauguaugucaagcacaaugccagugccuggcauauaccccuugcucacugaagaguagccaauaugaauauuugcagcuaugggccugggacccacccaaaagcaugggcaacacccuccugugaccgaaagggagggacugugagaaugaccccuccucagccuucauuucuccucauuucccacccguccucaauucuggguacaucugucuccaguuuauacucugaagacagcagggcugugaguuacagguugcccagggcauuuuuguggaggcagagaguuuagagcugaugacagccugggagagcucuggggaggcuuccaaaccaaaguggauggaggggaacuggggaggagggaucugagugagguuagucccggcuaaccucacucaguucuaacuacccugggcugguccuggggcuucucacagccucaguagcaccccccguccccuuauucacuggucucggauacucuagaccuguggccuggcuugcuaggacaggggcuuucaggcuuugccagacucagccucucuagacuugggccuacaagccucacacccaccggguguuggcaugcacgucuguuuggaggaggaccgacagcugggaaguggcagaggcugggcuggaagggugagaggguugguggucuccagggaagcgggaaguaaacucgugcccuucuguacuuugcccggugcccuggaccauggaggguuucguuggggugugaauaacagaaaccuaagugagcagggccuaaaugaaacaguguauccaucucucacuuagccccacguccagagguggguguagguuggucugaagucaggguugaggacucguccguucuccagguuuuucucucauggucgcaagauguuggcuucagcugcugccgucacauuugugcagaggcaggaggaaggaagaaguuccagagaguugaguuuccacacagcaacucccaauuucauuuccuuggccagacugugacacggccaccccuagcucuagucuuccaaggugguugagucuuucugaauggguugccuuugcauuggaaucuggcccagggaugaugccacuguuuuuggugacugguucuuguguuugaagccgcugacaugagcuugguacuguucuauggaguucagcacuaucuuacauguuuugcagggguagcccuuuccagcuggaaagucagugacagcaggguccgccagccgcccauagcgugccauuaguuugagcuuggucuccuguuuucuguguuucuugcccacauaauguuguugagccaugacagggucguugaaaguugcauggcagaggcugcagaacuugucugggucuaucaucucucuauucuggugcaaggcuuccaccuuaguggacugcugcuucagcuuuaaguucuuugcgugggucuuccccagguagugcgacugggccacgacaggggaggaaaaggucauguuacagauggggcagcacugguucuugucuuugcuucugcugcucuucugaucugagucuagcuucuucguuucccccuuuaaugucuccauuccauggauugcuagguaucucuucacuuuguuggcauguuuuuugcucugguaaugugccagcuucugggacucagaaauaagcaaggcgcagcaaaccuuacacuggguguuggugaagagacauugguucuucuggaucaugugcuccacugguucagggagcucagccuguggugucaaacugggaauuccuggcuccuuuuccaugucaccaaugcuggcacuggauuuaucacaaacauuuaaccguggcccagcugaaucuaagcagucagcaugauuuugcucugucagugguuccucaaguaugcuugcugaaggaguucuaugcucuggaaacucaucccgccccuccugcacagggucacuaggaaguaagacccuaaaggcacacucagaguuuucuuucucuuuaaaucuguucaugcgcuuacgagguuuagugcgccuuugguuuaaacgcugccaccgcuuuuuaggcaccacuugauuuacaccauugaguucaucauucucacuguucauuacagaguccagcucugggccuuuuccguuuucaaaagagaguccuuuuucagaaauuuuaccaggaucagauugcuuaaccuugcuaucgaaaugcacaucagaaaaauggucaccaucuucacuuguuaaguggcccauuaucugaaggggauccucuuuacuaggaucuucugccccaccucucaaugaaccuccacguucucggucucccugcaguacagcaucaagagucacacuuggaagcugauucaguuuucuuuugcgcucggucuuuaaggcuuuacgguucacuguguucuuuaccauuugggcugaaaaagcaucucgcaauuuggaugaaggcuuugaucguccacaguugcgccuaguaacacagucugaacgacuuuuaccagaagcagggaggucucucuugucggacaguaagccagguagggaagcagacaacucgccagauaaugcagagucacccccacuagggcuaggauuggcggaguucugagugccaucucccuuuuucucugaauuguguguggagccuccugaaaccaaaaccuuagagacuccuacaggacuauuaguagaacaguccccacgaccaggacuccgguaagagaccagguuuugagcagucaucaaccgcugcuccuucgucuuacuaucaugcauaucuuucaacaucauuagcaauguacugaauuuguagucugguucaauagguaugugauucugacuagaagcagaagagaaaaguaaugguuuugauggcuuugauguuccagagucacugacauccucaccuaaggaucuguaagagaguuccuucaacucggauaaaacauguuucaccacugcuguuucuaugucacuugaaucccugguuuucucaugcauauuguucaguaguuuuagaccauccacuuucccacuuuuagaaaugcuggccaaaggagagccuuugguaucagaagagcagcauuucaaacugcacuccucauuuauaacuggggguucugccauaacuggauuuucuuuguguuugcacuuuauacuucggaacuugggcuguuugcuuuucgaauguaauagagcuugauuugcugccccacccuuuauuaacgaguucucacuggauaugcuugaugacagguugaauuuuggagagagagcaucauuuguaaaaucugacugggguuugugaacaagaguagaugccuucagaucagagagauuaaccugagacgucucgguuccaggcucugcacucuuaguacaacccauuaaguggucuguaugugaguuacuaaugagaggcuucuguuuugcuuuuacccuaguguuuguggcagcaaaccuagaauacuuuaucuuuucauuuuucugcauagauaacauguucucuguucuaucgaaagcaucuggaauuucaaggacacuguuaucagacucugagcuguguucuaugggauccaggucacugcuuccaucaucagaagugguacagauacuaauggaaucacuucgcuuuuccucaucaccugcuccaauauagcagagcuucacuuuugaaccacacaccaggcuucguugggguuuauucuucucucgagaacacuuugagaucaaagcacccucaggcaagcccaauaaagagucaccauuugaagucucaaauucuuucuuugcaguguuuuuuccacaggaagaaaacagaaaacuuccuggggcaguguuggacccugugaggcuauuugcuauccuggaaaguucauuagaggccugcguaucagauauauccccagagauaaaguuuaggccaagguucucuggaaucuuuccccuccguucaucuuuaugugcuucaaauuguauguggcccuuuuucacacuaguccuuuuuggauuaucagagcucuuucuggcucgagauuuagcgcaaggcuuuuccuucucaucugcagaauguucagaaucaaaagccagugauuucaaacagccauuaagcaacaggucauguucugacucaggaucauuugugcagucuucaaauggcauaucuucuucacuguccaacuugauugaaccaggaauacauuuucgguucuuugaccccuugggaacaucauacuguucugcaaguccaacacuggcuucccauuuacucaaaauuuucugaggaaccuuaugccuauauccuuuuucuuucuguuucccucuucuccuaaggacagguagcucuucgaauugaugucugccuucaaacaugacgauugcuuuuccagccacccaggcucucucagaaggaucuccaaaagccuccacguaguacugccgauagggccuccgguuggaaacuuucauuuuugaauguguguuaaucaacggaucagaacaaauccugcagggccaccaugggcgucucuugaauuuugcccagaugagaucuccaacuucauacuucaguggcguagacuuuuucuuagguugacaaaauggcaauuccugugaaguagaugaugaugaaguuccagguaauucuagcauguuuccuaauguacugguacuggaaucuggaucauccugaaaagauaaauuuauugaguuuaauugcucuucuauuguaauguuugugucuccuagugaaaagggggcugggagaagggcugcuuuuucauugcugccguccacuucauuucuuugcuuauuuuucuguguuucagucugaggagcuaauggcaagaauggcgauuugacugcaccgugucuacucucuggugugcugucuuguucacuucccauggccacuuuuacaccauucucugauuuagucucauaauugcagguggcauuggucugaguuuccucaaagaucuccucuauacucucauccucugugacuggcuguucuggguccauuucagaaucuacaucugcaucguccacacaaguaaaauucucaaagugcagaaagccauucuugauagucuuuguuacuuuuaccuggaguucaggggaguuauuacaagaggguuccuguuucauagcaagugcuguaggaccaccaggacucaaggaagugcaaacaauuggcgucugagcucuugaaucacuuuuuucagggucuugaaaggauucugauccaucagcagacccauuuaaauacucuacauugaucauggaggccaaauccuguagucuccgcaguggaauguaacaagauggagaaucuuguccauaagcauuuugggauguuccacugacagucgauaacugcauaguacacccauuaaguggcucagaaaaauuggauugaccauuaccgaaagggcuguccuugucuucaggggcaucuaaauucacuggauuggaaaagggcagcagacaauuucuucuggguaguucacaggucugauccauccugggccggcaucaaccgugccccgcgcccccucccgggccagcuggggggagggggugacccucauuacacuggggugcgagcggagcgguggggagagagcggggccgcucgccgcaccccccuccccccgcguc

SEQ ID NO: 2016 - RNA, 2936 nt, Homo sapiens
aaacaaguuuuauuuugagaacauuuuaaaauacagaaaaaguacacagggucauaccauacccagcugcucagaauugacaauuguucauuaccauuucuuuuuuuuaaguugaaacagggucucauuauguugcccaggcuggucuugaacuccugggcucaagcaaucugccugucucggccuccaaaagugcugggaguacaggcuugagccaccgcaccuggccuauuuuaucauucuuuuccaacccuuuucuaccuuggcuucuccacaggcuccagggaggucuagcuuggcuggucaaaacggaggugacauugacagaaagugagugauuaaagguugggugucagagucggacagaucuggguuuuuuuuggagacagagucuuacucugucgcucaggcuggaaugcaguggcacgaucuaggcucacugcaaccaccaccuccuggguucaagugauucuccugccucagccaccugaguagcugggauuacgggugugugccaccacgcccagcuaauuuuuguauuuuugguagagacgggguuuugccauuguuggccaggcuugaacuccuggccacaggagaucugcuggccucagucucccaaagggcugggauuauaggugugagccaccuugcccagugacagaucuggguuugagucccgaaaacucuuuguggucacggacaaaucacuuaaccucaagccucaguuucaucuucugugaaaugggaauaauacaucuuccgugaggacucaguaugaugauguaugucaagcacaaugccagugccuggcauauaccccuugcucacugaagaguagccaauaugaauauuugcagcuaugggccugggacccacccaaaagcaugggcaacacccuccugugaccgaaagggagggacugugagaaugaccccuccucagccuucauuucuccucauuucccacccguccucaauucuggguacaucugucuccaguuuauacucugaagacagcagggcugugaguuacagguugcccagggcauuuuuguggaggcagagaguuuagagcugaugacagccugggagagcucuggggaggcuuccaaaccaaaguggauggaggggaacuggggaggagggaucugagugagguuagucccggcuaaccucacucaguucuaacuacccugggcugguccuggggcuucucacagccucaguagcaccccccguccccuuauucacuggucucggauacucuagaccuguggccuggcuugcuaggacaggggcuuucaggcuuugccagacucagccucucuagacuugggccuacaagccucacacccaccggguguuggcaugcacgucuguuuggaggaggaccgacagcugggaaguggcagaggcugggcuggaagggugagaggguugguggucuccagggaagcgggaaguaaacucgugcccuucuguacuuugcccggugcccuggaccauggaggguuucguuggggugugaauaacagaaaccuaagugagcagggccuaaaugaaacaguguauccaucucucacuuagccccacguccagagguggguguagguuggucugaagucaggguugaggacucguccguucuccagguuuuucucucauggucgcaagauguuggcuucagcugcugccgucacauuugugcagaggcaggaggaaggaagaaguuccagagaguugaguuuccacacagcaacucccaauuucauuuccuuggccagacugugacacggccaccccuagcucuagucuuccaaggugguugagucuuucugaauggguugccuuugcauuggaaucuggcccagggaugaugccacuguuuuuggugacugguucuuguguuugaagccgcugacaugagcuugguacuguucuauggaguucagcacuaucuuacauguuuugcagggguagcccuuuccagcuggaaagucagugacagcaggguccgccagccgcccauagcgugccauuaguuugagcuuggucuccuguuuucuguguuucuugcccacauaauguuguugagccaugacagggucguugaaaguugcauggcagaggcugcagaacuugucugggucuaucaucucucuauucuggugcaaggcuuccaccuuaguggacugcugcuucagcuuuaaguucuuugcgugggucuuccccagguagugcgacugggccacgacaggggaggaaaaggucauguuacagauggggcagcacugguucuugucuuugcuucugcugcucuucugaucugagucuagcuucuucguuucccccuuuaaugucuccauuccauggauugcuagguaucucuucacuuuguuggcauguuuuuugcucugguaaugugccagcuucugggacucagaaauaagcaaggcgcagcaaaccuuacacuggguguuggugaagagacauugguucuucuggaucaugugcuccacuuucauuuuugaauguguguuaaucaacggaucagaacaaauccugcagggccaccaugggcgucucuugaauuuugcccagaugagaucuccaacuucauacuucaguggcguagacuuuuucuuagguugacaaaauggcaauuccugugaaguagaugaugaugaaguuccagguaauucuagcauguuuccuaauguacugguacuggaaucuggaucauccgaaagggcuguccuugucuucaggggcaucuaaauucacuggauuggaaaagggcagcagacaauuucuucuggguaguucacaggucugauccauccugggccggcaucaaccugggggcuugggcuggggucuucgaggccucaggccccgagcagacgcggccgcaggcgaacccccuacccggcc

SEQ ID NO: 2017 - RNA, 5908 nt, Homo sapiens
uuagauagagucuuguuauguugcccuggcuggagugcagugguuauucacaggcaugaucacagcauacuucaggcuggaacuccugggcuugaauggucuuucugccuuagccuccugagcagcugggacuauaggugcaugacgccgcaccuggccauaacacuccuucucagcucauuuuugagucaugaaaaaugcucuuucaagaaucaccaggccuaugauaagucccauggaacaaaccuaucacuguguaagagcugagcaggagaaaaccaucucuccucauacaccucauuuguucauucaauaaaaauucaugacacaccacuauggacaucaggaaguagagaugaauaaggcugggucucugcccuaagugauuagccuggaaagccauacuggacacaguguccauacuggccuccuugucuccuuuccugccccucccugcacuccuuuacauaacagccagaacaguucucucaaacauaaagcagauccccagcuuaaacccuuuaaagaccuucaugaggcccuaugugacaggagaagcaggagaaggugguggaugagaagaugaggcuguacugaguucagggcaccugaacucaagggagacuuucacagggugcucgacucugucccaacuccuaaagugacuacuggggacuacugaggucugaauggggugggggugaggggucaagacagacauacuagauccaauggcaauauggcucaaaacccuaggucuguuaaguuguagucuggcccaugagggaaauucuuuauuuggaugcuucagugaccaagagacagagcauuaggcacacacagaagcacacacauacacacaaacacacacacacacacacacacauccacacacaauaugcaaagcaaaggcauuucacaggugaagggauagggagugggggaaggaggccacgagagcagcuaggggcuucuuugacacaaugaagagaagccucugauggugacacuccuuggaauucucgucucaagguuacaaggaaaaaucuauccguguggacucagucccaggccauaaaacacagcaaagauagagaaaucuggguguggggccugggaaacgccuguuccucacuguagaaaccugcaucagcucucucuuucuuucccugggacccagaaaucacccgguggaugauggggaaggcuagcaccacagcaaacugggcaagugguccgcugcacaagggggaagagagggcuaguagggccgaggguagcaaugaaccucacagcuagcgggcaugaggcagucugccuuuaggggcagaacccucagggagacuugcauguggggcacuuucccguguaaccuagggucagagcaccucugauggaggaggggaaaggucccauccccauuggaguguccuaugaucucaguggacauggaggccgcccccagccccagcucguugccaacugcugcagauccuuagcaccauucaggaacuguggagggggcagcggggguagcaaugcuccgccaagauugugucacugcuccaggaggauacuucacaguuggcagaaaccugcgcaacuggccauaucuggucuaagacucaggaaagccugcaccuucugggggaaggcagagugucguauuagcuccaagcucccauguugcagccauuuccucuguuuccugcccugccccagguuuggcaugaaaguuccagguuuugcuggaaaugucuagggcccagagagaucucugcucuuuaguugcaagaacuggcccaaaacugaccuuuagaggaaagacagguggcaggggccucagcaccuaaggcccagagggguugggaaauggggaaagccacccuccaaacuaccaccccgcgagaccccgagucucucaauacccuugccuccccugucaugaccuacaggaccccugccaaaggggagcagcaggagugaauuagcccggaccaaugagaggcugucuguggcccaauccugccucaggcccguguacuuuccuggugagaacaacgagcaagagggagccaagggcugagcagucacgggaagcuggcucauggcuggcccaauaugggaugcugggcagaaucaccucuagucuuccaaggugguugagucuuucugaauggguugccuuugcauuggaaucuggcccagggaugaugccacuguuuuuggugacugguucuuguguuugaagccgcugacaugagcuugguacuguucuauggaguucagcacuaucuuacauguuuugcagggguagcccuuuccagcuggaaagucagugacagcaggguccgccagccgcccauagcgugccauuaguuugagcuuggucuccuguuuucuguguuucuugcccacauaauguuguugagccaugacagggucguugaaaguugcauggcagaggcugcagaacuugucugggucuaucaucucucuauucuggugcaaggcuuccaccuuaguggacugcugcuucagcuuuaaguucuuugcgugggucuuccccagguagugcgacugggccacgacaggggaggaaaaggucauguuacagauggggcagcacugguucuugucuuugcuucugcugcucugguaaugugccagcuucugggacucagaaauaagcaaggcgcagcaaaccuuacacuggguguuggugaagagacauugguucuucuggaucaugugcuccacugguucagggagcucagccuguggugucaaacugggaauuccuggcuccuuuuccaugucaccaaugcuggcacuggauuuaucacaaacauuuaaccguggcccagcugaaucuaagcagucagcaugauuuugcucugucagugguuccucaaguaugcuugcugaaggaguucuaugcucuggaaacucaucccgccccuccugcacagggucacuaggaaguaagacccuaaaggcacacucagaguuuucuuucucuuuaaaucuguucaugcgcuuacgagguuuagugcgccuuugguuuaaacgcugccaccgcuuuuuaggcaccacuugauuuacaccauugaguucaucauucucacuguucauuacagaguccagcucugggccuuuuccguuuucaaaagagaguccuuuuucagaaauuuuaccaggaucagauugcuuaaccuugcuaucgaaaugcacaucagaaaaauggucaccaucuucacuuguuaaguggcccauuaucugaaggggauccucuuuacuaggaucuucugccccaccucucaaugaaccuccacguucucggucucccugcaguacagcaucaagagucacacuuggaagcugauucaguuuucuuuugcgcucggucuuuaaggcuuuacgguucacuguguucuuuaccauuugggcugaaaaagcaucucgcaauuuggaugaaggcuuugaucguccacaguugcgccuaguaacacagucugaacgacuuuuaccagaagcagggaggucucucuugucggacaguaagccagguagggaagcagacaacucgccagauaaugcagagucacccccacuagggcuaggauuggcggaguucugagugccaucucccuuuuucucugaauuguguguggagccuccugaaaccaaaaccuuagagacuccuacaggacuauuaguagaacaguccccacgaccaggacuccgguaagagaccagguuuugagcagucaucaaccgcugcuccuucgucuuacuaucaugcauaucuuucaacaucauuagcaauguacugaauuuguagucugguucaauagguaugugauucugacuagaagcagaagagaaaaguaaugguuuugauggcuuugauguuccagagucacugacauccucaccuaaggaucuguaagagaguuccuucaacucggauaaaacauguuucaccacugcuguuucuaugucacuugaaucccugguuuucucaugcauauuguucaguaguuuuagaccauccacuuucccacuuuuagaaaugcuggccaaaggagagccuuugguaucagaagagcagcauuucaaacugcacuccucauuuauaacuggggguucugccauaacuggauuuucuuuguguuugcacuuuauacuucggaacuugggcuguuugcuuuucgaauguaauagagcuugauuugcugccccacccuuuauuaacgaguucucacuggauaugcuugaugacagguugaauuuuggagagagagcaucauuuguaaaaucugacugggguuugugaacaagaguagaugccuucagaucagagagauuaaccugagacgucucgguuccaggcucugcacucuuaguacaacccauuaaguggucuguaugugaguuacuaaugagaggcuucuguuuugcuuuuacccuaguguuuguggcagcaaaccuagaauacuuuaucuuuucauuuuucugcauagauaacauguucucuguucuaucgaaagcaucuggaauuucaaggacacuguuaucagacucugagcuguguucuaugggauccaggucacugcuuccaucaucagaagugguacagauacuaauggaaucacuucgcuuuuccucaucaccugcuccaauauagcagagcuucacuuuugaaccacacaccaggcuucguugggguuuauucuucucucgagaacacuuugagaucaaagcacccucaggcaagcccaauaaagagucaccauuugaagucucaaauucuuucuuugcaguguuuuuuccacaggaagaaaacagaaaacuuccuggggcaguguuggacccugugaggcuauuugcuauccuggaaaguucauuagaggccugcguaucagauauauccccagagauaaaguuuaggccaagguucucuggaaucuuuccccuccguucaucuuuaugugcuucaaauuguauguggcccuuuuucacacuaguccuuuuuggauuaucagagcucuuucuggcucgagauuuagcgcaaggcuuuuccuucucaucugcagaauguucagaaucaaaagccagugauuucaaacagccauuaagcaacaggucauguucugacucaggaucauuugugcagucuucaaauggcauaucuucuucacuguccaacuugauugaaccaggaauacauuuucgguucuuugaccccuugggaacaucauacuguucugcaaguccaacacuggcuucccauuuacucaaaauuuucugaggaaccuuaugccuauauccuuuuucuuucuguuucccucuucuccuaaggacagguagcucuucgaauugaugucugccuucaaacaugacgauugcuuuuccagccacccaggcucucucagaaggaucuccaaaagccuccacguaguacugccgauagggccuccgguuggaaacuuucauuuuugaauguguguuaaucaacggaucagaacaaauccugcagggccaccaugggcgucucuugaauuuugcccagaugagaucuccaacuucauacuucaguggcguagacuuuuucuuagguugacaaaauggcaauuccugugaaguagaugaugaugaaguuccagguaauucuagcauguuuccuaauguacugguacuggaaucuggaucauccgaaagggcuguccuugucuucaggggcaucuaaauucacuggauuggaaaagggcagcagacaauuucuucuggguaguucacaggucugauccauccugggccggcaucaaccugggggcuugggcuggggucuucgaggccucaggccccgagcagacgcggccgcaggcgaacccccuacccggcc

SEQ ID NO: 2018 - RNA, 6917 nt, Homo sapiens
aaacaaguuuuauuuugagaacauuuuaaaauacagaaaaaguacacagggucauaccauacccagcugcucagaauugacaauuguucauuaccauuucuuuuuuuuaaguugaaacagggucucauuauguugcccaggcuggucuugaacuccugggcucaagcaaucugccugucucggccuccaaaagugcugggaguacaggcuugagccaccgcaccuggccuauuuuaucauucuuuuccaacccuuuucuaccuuggcuucuccacaggcuccagggaggucuagcuuggcuggucaaaacggaggugacauugacagaaagugagugauuaaagguugggugucagagucggacagaucuggguuuuuuuuggagacagagucuuacucugucgcucaggcuggaaugcaguggcacgaucuaggcucacugcaaccaccaccuccuggguucaagugauucuccugccucagccaccugaguagcugggauuacgggugugugccaccacgcccagcuaauuuuuguauuuuugguagagacgggguuuugccauuguuggccaggcuugaacuccuggccacaggagaucugcuggccucagucucccaaagggcugggauuauaggugugagccaccuugcccagugacagaucuggguuugagucccgaaaacucuuuguggucacggacaaaucacuuaaccucaagccucaguuucaucuucugugaaaugggaauaauacaucuuccgugaggacucaguaugaugauguaugucaagcacaaugccagugccuggcauauaccccuugcucacugaagaguagccaauaugaauauuugcagcuaugggccugggacccacccaaaagcaugggcaacacccuccugugaccgaaagggagggacugugagaaugaccccuccucagccuucauuucuccucauuucccacccguccucaauucuggguacaucugucuccaguuuauacucugaagacagcagggcugugaguuacagguugcccagggcauuuuuguggaggcagagaguuuagagcugaugacagccugggagagcucuggggaggcuuccaaaccaaaguggauggaggggaacuggggaggagggaucugagugagguuagucccggcuaaccucacucaguucuaacuacccugggcugguccuggggcuucucacagccucaguagcaccccccguccccuuauucacuggucucggauacucuagaccuguggccuggcuugcuaggacaggggcuuucaggcuuugccagacucagccucucuagacuugggccuacaagccucacacccaccggguguuggcaugcacgucuguuuggaggaggaccgacagcugggaaguggcagaggcugggcuggaagggugagaggguugguggucuccagggaagcgggaaguaaacucgugcccuucuguacuuugcccggugcccuggaccauggaggguuucguuggggugugaauaacagaaaccuaagugagcagggccuaaaugaaacaguguauccaucucucacuuagccccacguccagagguggguguagguuggucugaagucaggguugaggacucguccguucuccagguuuuucucucauggucgcaagauguuggcuucagcugcugccgucacauuugugcagaggcaggaggaaggaagaaguuccagagaguugaguuuccacacagcaacucccaauuucauuuccuuggccagacugugacacggccaccccuagcucuagucuuccaaggugguugagucuuucugaauggguugccuuugcauuggaaucuggcccagggaugaugccacuguuuuuggugacugguucuuguguuugaagccgcugacaugagcuugguacuguucuauggaguucagcacuaucuuacauguuuugcagggguagcccuuuccagcuggaaagucagugacagcaggguccgccagccgcccauagcgugccauuaguuugagcuuggucuccuguuuucuguguuucuugcccacauaauguuguugagccaugacagggucguugaaaguugcauggcagaggcugcagaacuugucugggucuaucaucucucuauucuggugcaaggcuuccaccuuaguggacugcugcuucagcuuuaaguucuuugcgugggucuuccccagguagugcgacugggccacgacaggggaggaaaaggucauguuacagauggggcagcacugguucuugucuuugcuucugcugcucuucugaucugagucuagcuucuucguuucccccuuuaaugucuccauuccauggauugcuagguaucucuucacuuuguuggcauguuuuuugcucugguaaugugccagcuucugggacucagaaauaagcaaggcgcagcaaaccuuacacuggguguuggugaagagacauugguucuucuggaucaugugcuccacugugcgacauucauugcagauaaauuuuccucuuggcaucucagucaauccaaggcacuccagguggaaagccccacagcacugagccucacauaacagcagcucacccaauuuuucacaauucugacagacauucuccuugagugcagcuccuccaccgcguucacccugcauuuuuuuagaggcaggcaucccgggaucguguucuacaccuuccucaacagucuccuuggggcuuguggccguccugugaggcauuaguucucccucugagccuggaaucucuuuugacgagucaucauuuuucacuuuuuuacacugcaucuuggcugcagcaugccucugucguuuucgcuuccuuggcuugucaaauaucuugguagugccuccaccaaaaucuuuugaauaagauguggcacaagauucaguuaugccauucuccaggugaccagcuucauagcacuuuuuagaaaggccaaggucccccuucuugggcauaaauccagggucuaaaucauuggauucaagaaguuucuuaguugguuuucuuugacguuuacuuucauaauuuccuggcguuuuaacuagcaauuccucagacucaagggcaggccguggagagacuuccggagccacaggcacagacaaggucagcugcggcaacucagcauguccaccuccaaguucugacugagccaaggggcccuccaaaaacggagccucccuuucaagaacuggaggcucuucuuugguugaaaucaaagaauucucguccaccugcuuguucugagcacuagaucgaccucgggcuagaaggcuuuccucuucacagcgggaacuuaccuugugcaccugcuccuguaccuucuuuuguuuuuucuuaggagcaaauaucugaucauauucuucuguauauuccaaaagccacuugcuuggcuuccuaaggcguuucuucucugaccgcacagcugguucagggagcucagccuguggugucaaacugggaauuccuggcuccuuuuccaugucaccaaugcuggcacuggauuuaucacaaacauuuaaccguggcccagcugaaucuaagcagucagcaugauuuugcucugucagugguuccucaaguaugcuugcugaaggaguucuaugcucuggaaacucaucccgccccuccugcacagggucacuaggaaguaagacccuaaaggcacacucagaguuuucuuucucuuuaaaucuguucaugcgcuuacgagguuuagugcgccuuugguuuaaacgcugccaccgcuuuuuaggcaccacuugauuuacaccauugaguucaucauucucacuguucauuacagaguccagcucugggccuuuuccguuuucaaaagagaguccuuuuucagaaauuuuaccaggaucagauugcuuaaccuugcuaucgaaaugcacaucagaaaaauggucaccaucuucacuuguuaaguggcccauuaucugaaggggauccucuuuacuaggaucuucugccccaccucucaaugaaccuccacguucucggucucccugcaguacagcaucaagagucacacuuggaagcugauucaguuuucuuuugcgcucggucuuuaaggcuuuacgguucacuguguucuuuaccauuugggcugaaaaagcaucucgcaauuuggaugaaggcuuugaucguccacaguugcgccuaguaacacagucugaacgacuuuuaccagaagcagggaggucucucuugucggacaguaagccagguagggaagcagacaacucgccagauaaugcagagucacccccacuagggcuaggauuggcggaguucugagugccaucucccuuuuucucugaauuguguguggagccuccugaaaccaaaaccuuagagacuccuacaggacuauuaguagaacaguccccacgaccaggacuccgguaagagaccagguuuugagcagucaucaaccgcugcuccuucgucuuacuaucaugcauaucuuucaacaucauuagcaauguacugaauuuguagucugguucaauagguaugugauucugacuagaagcagaagagaaaaguaaugguuuugauggcuuugauguuccagagucacugacauccucaccuaaggaucuguaagagaguuccuucaacucggauaaaacauguuucaccacugcuguuucuaugucacuugaaucccugguuuucucaugcauauuguucaguaguuuuagaccauccacuuucccacuuuuagaaaugcuggccaaaggagagccuuugguaucagaagagcagcauuucaaacugcacuccucauuuauaacuggggguucugccauaacuggauuuucuuuguguuugcacuuuauacuucggaacuugggcuguuugcuuuucgaauguaauagagcuugauuugcugccccacccuuuauuaacgaguucucacuggauaugcuugaugacagguugaauuuuggagagagagcaucauuuguaaaaucugacugggguuugugaacaagaguagaugccuucagaucagagagauuaaccugagacgucucgguuccaggcucugcacucuuaguacaacccauuaaguggucuguaugugaguuacuaaugagaggcuucuguuuugcuuuuacccuaguguuuguggcagcaaaccuagaauacuuuaucuuuucauuuuucugcauagauaacauguucucuguucuaucgaaagcaucuggaauuucaaggacacuguuaucagacucugagcuguguucuaugggauccaggucacugcuuccaucaucagaagugguacagauacuaauggaaucacuucgcuuuuccucaucaccugcuccaauauagcagagcuucacuuuugaaccacacaccaggcuucguugggguuuauucuucucucgagaacacuuugagaucaaagcacccucaggcaagcccaauaaagagucaccauuugaagucucaaauucuuucuuugcaguguuuuuuccacaggaagaaaacagaaaacuuccuggggcaguguuggacccugugaggcuauuugcuauccuggaaaguucauuagaggccugcguaucagauauauccccagagauaaaguuuaggccaagguucucuggaaucuuuccccuccguucaucuuuaugugcuucaaauuguauguggcccuuuuucacacuaguccuuuuuggauuaucagagcucuuucuggcucgagauuuagcgcaaggcuuuuccuucucaucugcagaauguucagaaucaaaagccagugauuucaaacagccauuaagcaacaggucauguucugacucaggaucauuugugcagucuucaaauggcauaucuucuucacuguccaacuugauugaaccaggaauacauuuucgguucuuugaccccuugggaacaucauacuguucugcaaguccaacacuggcuucccauuuacucaaaauuuucugaggaaccuuaugccuauauccuuuuucuuucuguuucccucuucuccuaaggacagguagcucuucgaauugaugucugccuucaaacaugacgauugcuuuuccagccacccaggcucucucagaaggaucuccaaaagccuccacguaguacugccgauagggccuccgguuggaaacuuucauuuuugaauguguguuaaucaacggaucagaacaaauccugcagggccaccaugggcgucucuugaauuuugcccagaugagaucuccaacuucauacuucaguggcguagacuuuuucuuagguugacacccucacaaccuuacaagacagcauuaucucgauuuugcagauaaagaaacugaggcucaaaaagguuaagucacaggcugggugcgguggcucaugccuguaaucccagcacuuugggaggccaaggugggagaaucacuggaggucaggaguucaagaccagccuggcaaacauggugaaaccccaucucuacuaaaaauacaaagauuagccgagcaugguggugugugccuguaaucccagcuacuugggagguugaggcagaagaaucgcuugaaccugggaggcggagguugcagugagccaagaucuuaccacugcauuccagccugggcaacggagugagauuccagaaauggcaauuccugugaaguagaugaugaugaaguuccagguaauucuagcauguuuccuaauguacugguacuggaaucuggaucauccgaaagggcuguccuugucuucaggggcaucuaaauucacuggauuggaaaagggcagcagacaauuucuucuggguaguucacaggucugauccauccugggccggcaucaac

SEQ ID NO: 2019 - RNA, 5669 nt, Homo sapiens
aaacaaguuuuauuuugagaacauuuuaaaauacagaaaaaguacacagggucauaccauacccagcugcucagaauugacaauuguucauuaccauuucuuuuuuuuaaguugaaacagggucucauuauguugcccaggcuggucuugaacuccugggcucaagcaaucugccugucucggccuccaaaagugcugggaguacaggcuugagccaccgcaccuggccuauuuuaucauucuuuuccaacccuuuucuaccuuggcuucuccacaggcuccagggaggucuagcuuggcuggucaaaacggaggugacauugacagaaagugagugauuaaagguugggugucagagucggacagaucuggguuuuuuuuggagacagagucuuacucugucgcucaggcuggaaugcaguggcacgaucuaggcucacugcaaccaccaccuccuggguucaagugauucuccugccucagccaccugaguagcugggauuacgggugugugccaccacgcccagcuaauuuuuguauuuuugguagagacgggguuuugccauuguuggccaggcuugaacuccuggccacaggagaucugcuggccucagucucccaaagggcugggauuauaggugugagccaccuugcccagugacagaucuggguuugagucccgaaaacucuuuguggucacggacaaaucacuuaaccucaagccucaguuucaucuucugugaaaugggaauaauacaucuuccgugaggacucaguaugaugauguaugucaagcacaaugccagugccuggcauauaccccuugcucacugaagaguagccaauaugaauauuugcagcuaugggccugggacccacccaaaagcaugggcaacacccuccugugaccgaaagggagggacugugagaaugaccccuccucagccuucauuucuccucauuucccacccguccucaauucuggguacaucugucuccaguuuauacucugaagacagcagggcugugaguuacagguugcccagggcauuuuuguggaggcagagaguuuagagcugaugacagccugggagagcucuggggaggcuuccaaaccaaaguggauggaggggaacuggggaggagggaucugagugagguuagucccggcuaaccucacucaguucuaacuacccugggcugguccuggggcuucucacagccucaguagcaccccccguccccuuauucacuggucucggauacucuagaccuguggccuggcuugcuaggacaggggcuuucaggcuuugccagacucagccucucuagacuugggccuacaagccucacacccaccggguguuggcaugcacgucuguuuggaggaggaccgacagcugggaaguggcagaggcugggcuggaagggugagaggguugguggucuccagggaagcgggaaguaaacucgugcccuucuguacuuugcccggugcccuggaccauggaggguuucguuggggugugaauaacagaaaccuaagugagcagggccuaaaugaaacaguguauccaucucucacuuagccccacguccagagguggguguagguuggucugaagucaggguugaggacucguccguucuccagguuuuucucucauggucgcaagauguuggcuucagcugcugccgucacauuugugcagaggcaggaggaaggaagaaguuccagagaguugaguuuccacacagcaacucccaauuucauuuccuuggccagacugugacacggccaccccuagcucuagucuuccaaggugguugagucuuucugaauggguugccuuugcauuggaaucuggcccagggaugaugccacuguuuuuggugacugguucuuguguuugaagccgcugacaugagcuugguacuguucuauggaguucagcacuaucuuacauguuuugcagggguagcccuuuccagcuggaaagucagugacagcaggguccgccagccgcccauagcgugccauuaguuugagcuuggucuccuguuuucuguguuucuugcccacauaauguuguugagccaugacagggucguugaaaguugcauggcagaggcugcagaacuugucugggucuaucaucucucuauucuggugcaaggcuuccaccuuaguggacugcugcuucagcuuuaaguucuuugcgugggucuuccccagguagugcgacugggccacgacaggggaggaaaaggucauguuacagauggggcagcacugguucuugucuuugcuucugcugcucuucugaucugagucuagcuucuucguuucccccuuuaaugucuccauuccauggauugcuagguaucucuucacuuuguuggcauguuuuuugcucugguaaugugccagcuucugggacucagaaauaagcaaggcgcagcaaaccuuacacuggguguuggugaagagacauugguucuucuggaucaugugcuccacugguucagggagcucagccuguggugucaaacugggaauuccuggcuccuuuuccaugucaccaaugcuggcacuggauuuaucacaaacauuuaaccguggcccagcugaaucuaagcagucagcaugauuuugcucugucagugguuccucaaguaugcuugcugaaggaguucuaugcucuggaaacucaucccgccccuccugcacagggucacuaggaaguaagacccuaaaggcacacucagaguuuucuuucucuuuaaaucuguucaugcgcuuacgagguuuagugcgccuuugguuuaaacgcugccaccgcuuuuuaggcaccacuugauuuacaccauugaguucaucauucucacuguucauuacagaguccagcucugggccuuuuccguuuucaaaagagaguccuuuuucagaaauuuuaccaggaucagauugcuuaaccuugcuaucgaaaugcacaucagaaaaauggucaccaucuucacuuguuaaguggcccauuaucugaaggggauccucuuuacuaggaucuucugccccaccucucaaugaaccuccacguucucggucucccugcaguacagcaucaagagucacacuuggaagcugauucaguuuucuuuugcgcucggucuuuaaggcuuuacgguucacuguguucuuuaccauuugggcugaaaaagcaucucgcaauuuggaugaaggcuuugaucguccacaguugcgccuaguaacacagucugaacgacuuuuaccagaagcagggaggucucucuugucggacaguaagccagguagggaagcagacaacucgccagauaaugcagagucacccccacuagggcuaggauuggcggaguucugagugccaucucccuuuuucucugaauuguguguggagccuccugaaaccaaaaccuuagagacuccuacaggacuauuaguagaacaguccccacgaccaggacuccgguaagagaccagguuuugagcagucaucaaccgcugcuccuucgucuuacuaucaugcauaucuuucaacaucauuagcaauguacugaauuuguagucugguucaauagguaugugauucugacuagaagcagaagagaaaaguaaugguuuugauggcuuugauguuccagagucacugacauccucaccuaaggaucuguaagagaguuccuucaacucggauaaaacauguuucaccacugcuguuucuaugucacuugaaucccugguuuucucaugcauauuguucaguaguuuuagaccauccacuuucccacuuuuagaaaugcuggccaaaggagagccuuugguaucagaagagcagcauuucaaacugcacuccucauuuauaacuggggguucugccauaacuggauuuucuuuguguuugcacuuuauacuucggaacuugggcuguuugcuuuucgaauguaauagagcuugauuugcugccccacccuuuauuaacgaguucucacuggauaugcuugaugacagguugaauuuuggagagagagcaucauuuguaaaaucugacugggguuugugaacaagaguagaugccuucagaucagagagauuaaccugagacgucucgguuccaggcucugcacucuuaguacaacccauuaaguggucuguaugugaguuacuaaugagaggcuucuguuuugcuuuuacccuaguguuuguggcagcaaaccuagaauacuuuaucuuuucauuuuucugcauagauaacauguucucuguucuaucgaaagcaucuggaauuucaaggacacuguuaucagacucugagcuguguucuaugggauccaggucacugcuuccaucaucagaagugguacagauacuaauggaaucacuucgcuuuuccucaucaccugcuccaauauagcagagcuucacuuuugaaccacacaccaggcuucguugggguuuauucuucucucgagaacacuuugagaucaaagcacccucaggcaagcccaauaaagagucaccauuugaagucucaaauucuuucuuugcaguguuuuuuccacaggaagaaaacagaaaacuuccuggggcaguguuggacccugugaggcuauuugcuauccuggaaaguucauuagaggccugcguaucagauauauccccagagauaaaguuuaggccaagguucucuggaaucuuuccccuccguucaucuuuaugugcuucaaauuguauguggcccuuuuucacacuaguccuuuuuggauuaucagagcucuuucuggcucgagauuuagcgcaaggcuuuuccuucucaucugcagaauguucagaaucaaaagccagugauuucaaacagccauuaagcaacaggucauguucugacucaggaucauuugugcagucuucaaauggcauaucuucuucacuguccaacuugauugaaccaggaauacauuuucgguucuuugaccccuugggaacaucauacuguucugcaaguccaacacuggcuucccauuuacucaaaauuuucugaggaaccuuaugccuauauccuuuuucuuucuguuucccucuucuccuaaggacagguagcucuucgaauugaugucugccuucaaacaugacgauugcuuuuccagccacccaggcucucucagaaggaucuccaaaagccuccacguaguacugccgauagggccuccgguuggaaacuuucauuuuugaauguguguuaaucaacggaucagaacaaauccugcagggccaccaugggcgucucuugaauuuugcccagaugagaucuccaacuucauacuucaguggcguagacuuuuucuuagguugacaaaauggcaauuccugugaaguagaugaugaugaaguuccagguaauucuagcauguuuccuaauguacugguacuggaaucuggaucauccgaaagggcuguccuugucuucaggggcaucuaaauucacuggauuggaaaagggcagcagacaauuucuucuggguaguucacaggucugauccauccugggccggcaucaaccugggggcuugggcuggggucuucgaggccucaggccccgagcagacgcggccgcaggcgaacccccuacccggcc

SEQ ID NO: 2020 - RNA, 3175 nt, Homo sapiens
uuagauagagucuuguuauguugcccuggcuggagugcagugguuauucacaggcaugaucacagcauacuucaggcuggaacuccugggcuugaauggucuuucugccuuagccuccugagcagcugggacuauaggugcaugacgccgcaccuggccauaacacuccuucucagcucauuuuugagucaugaaaaaugcucuuucaagaaucaccaggccuaugauaagucccauggaacaaaccuaucacuguguaagagcugagcaggagaaaaccaucucuccucauacaccucauuuguucauucaauaaaaauucaugacacaccacuauggacaucaggaaguagagaugaauaaggcugggucucugcccuaagugauuagccuggaaagccauacuggacacaguguccauacuggccuccuugucuccuuuccugccccucccugcacuccuuuacauaacagccagaacaguucucucaaacauaaagcagauccccagcuuaaacccuuuaaagaccuucaugaggcccuaugugacaggagaagcaggagaaggugguggaugagaagaugaggcuguacugaguucagggcaccugaacucaagggagacuuucacagggugcucgacucugucccaacuccuaaagugacuacuggggacuacugaggucugaauggggugggggugaggggucaagacagacauacuagauccaauggcaauauggcucaaaacccuaggucuguuaaguuguagucuggcccaugagggaaauucuuuauuuggaugcuucagugaccaagagacagagcauuaggcacacacagaagcacacacauacacacaaacacacacacacacacacacacauccacacacaauaugcaaagcaaaggcauuucacaggugaagggauagggagugggggaaggaggccacgagagcagcuaggggcuucuuugacacaaugaagagaagccucugauggugacacuccuuggaauucucgucucaagguuacaaggaaaaaucuauccguguggacucagucccaggccauaaaacacagcaaagauagagaaaucuggguguggggccugggaaacgccuguuccucacuguagaaaccugcaucagcucucucuuucuuucccugggacccagaaaucacccgguggaugauggggaaggcuagcaccacagcaaacugggcaagugguccgcugcacaagggggaagagagggcuaguagggccgaggguagcaaugaaccucacagcuagcgggcaugaggcagucugccuuuaggggcagaacccucagggagacuugcauguggggcacuuucccguguaaccuagggucagagcaccucugauggaggaggggaaaggucccauccccauuggaguguccuaugaucucaguggacauggaggccgcccccagccccagcucguugccaacugcugcagauccuuagcaccauucaggaacuguggagggggcagcggggguagcaaugcuccgccaagauugugucacugcuccaggaggauacuucacaguuggcagaaaccugcgcaacuggccauaucuggucuaagacucaggaaagccugcaccuucugggggaaggcagagugucguauuagcuccaagcucccauguugcagccauuuccucuguuuccugcccugccccagguuuggcaugaaaguuccagguuuugcuggaaaugucuagggcccagagagaucucugcucuuuaguugcaagaacuggcccaaaacugaccuuuagaggaaagacagguggcaggggccucagcaccuaaggcccagagggguugggaaauggggaaagccacccuccaaacuaccaccccgcgagaccccgagucucucaauacccuugccuccccugucaugaccuacaggaccccugccaaaggggagcagcaggagugaauuagcccggaccaaugagaggcugucuguggcccaauccugccucaggcccguguacuuuccuggugagaacaacgagcaagagggagccaagggcugagcagucacgggaagcuggcucauggcuggcccaauaugggaugcugggcagaaucaccucuagucuuccaaggugguugagucuuucugaauggguugccuuugcauuggaaucuggcccagggaugaugccacuguuuuuggugacugguucuuguguuugaagccgcugacaugagcuugguacuguucuauggaguucagcacuaucuuacauguuuugcagggguagcccuuuccagcuggaaagucagugacagcaggguccgccagccgcccauagcgugccauuaguuugagcuuggucuccuguuuucuguguuucuugcccacauaauguuguugagccaugacagggucguugaaaguugcauggcagaggcugcagaacuugucugggucuaucaucucucuauucuggugcaaggcuuccaccuuaguggacugcugcuucagcuuuaaguucuuugcgugggucuuccccagguagugcgacugggccacgacaggggaggaaaaggucauguuacagauggggcagcacugguucuugucuuugcuucugcugcucugguaaugugccagcuucugggacucagaaauaagcaaggcgcagcaaaccuuacacuggguguuggugaagagacauugguucuucuggaucaugugcuccacuuucauuuuugaauguguguuaaucaacggaucagaacaaauccugcagggccaccaugggcgucucuugaauuuugcccagaugagaucuccaacuucauacuucaguggcguagacuuuuucuuagguugacaaaauggcaauuccugugaaguagaugaugaugaaguuccagguaauucuagcauguuuccuaauguacugguacuggaaucuggaucauccgaaagggcuguccuugucuucaggggcaucuaaauucacuggauuggaaaagggcagcagacaauuucuucuggguaguucacaggucugauccauccugggccggcaucaaccugggggcuugggcuggggucuucgaggccucaggccccgagcagacgcggccgcaggcgaacccccuacccggcc

SEQ ID NO: 2021 - RNA, 7156 nt, Homo sapiens
uuagauagagucuuguuauguugcccuggcuggagugcagugguuauucacaggcaugaucacagcauacuucaggcuggaacuccugggcuugaauggucuuucugccuuagccuccugagcagcugggacuauaggugcaugacgccgcaccuggccauaacacuccuucucagcucauuuuugagucaugaaaaaugcucuuucaagaaucaccaggccuaugauaagucccauggaacaaaccuaucacuguguaagagcugagcaggagaaaaccaucucuccucauacaccucauuuguucauucaauaaaaauucaugacacaccacuauggacaucaggaaguagagaugaauaaggcugggucucugcccuaagugauuagccuggaaagccauacuggacacaguguccauacuggccuccuugucuccuuuccugccccucccugcacuccuuuacauaacagccagaacaguucucucaaacauaaagcagauccccagcuuaaacccuuuaaagaccuucaugaggcccuaugugacaggagaagcaggagaaggugguggaugagaagaugaggcuguacugaguucagggcaccugaacucaagggagacuuucacagggugcucgacucugucccaacuccuaaagugacuacuggggacuacugaggucugaauggggugggggugaggggucaagacagacauacuagauccaauggcaauauggcucaaaacccuaggucuguuaaguuguagucuggcccaugagggaaauucuuuauuuggaugcuucagugaccaagagacagagcauuaggcacacacagaagcacacacauacacacaaacacacacacacacacacacacauccacacacaauaugcaaagcaaaggcauuucacaggugaagggauagggagugggggaaggaggccacgagagcagcuaggggcuucuuugacacaaugaagagaagccucugauggugacacuccuuggaauucucgucucaagguuacaaggaaaaaucuauccguguggacucagucccaggccauaaaacacagcaaagauagagaaaucuggguguggggccugggaaacgccuguuccucacuguagaaaccugcaucagcucucucuuucuuucccugggacccagaaaucacccgguggaugauggggaaggcuagcaccacagcaaacugggcaagugguccgcugcacaagggggaagagagggcuaguagggccgaggguagcaaugaaccucacagcuagcgggcaugaggcagucugccuuuaggggcagaacccucagggagacuugcauguggggcacuuucccguguaaccuagggucagagcaccucugauggaggaggggaaaggucccauccccauuggaguguccuaugaucucaguggacauggaggccgcccccagccccagcucguugccaacugcugcagauccuuagcaccauucaggaacuguggagggggcagcggggguagcaaugcuccgccaagauugugucacugcuccaggaggauacuucacaguuggcagaaaccugcgcaacuggccauaucuggucuaagacucaggaaagccugcaccuucugggggaaggcagagugucguauuagcuccaagcucccauguugcagccauuuccucuguuuccugcccugccccagguuuggcaugaaaguuccagguuuugcuggaaaugucuagggcccagagagaucucugcucuuuaguugcaagaacuggcccaaaacugaccuuuagaggaaagacagguggcaggggccucagcaccuaaggcccagagggguugggaaauggggaaagccacccuccaaacuaccaccccgcgagaccccgagucucucaauacccuugccuccccugucaugaccuacaggaccccugccaaaggggagcagcaggagugaauuagcccggaccaaugagaggcugucuguggcccaauccugccucaggcccguguacuuuccuggugagaacaacgagcaagagggagccaagggcugagcagucacgggaagcuggcucauggcuggcccaauaugggaugcugggcagaaucaccucuagucuuccaaggugguugagucuuucugaauggguugccuuugcauuggaaucuggcccagggaugaugccacuguuuuuggugacugguucuuguguuugaagccgcugacaugagcuugguacuguucuauggaguucagcacuaucuuacauguuuugcagggguagcccuuuccagcuggaaagucagugacagcaggguccgccagccgcccauagcgugccauuaguuugagcuuggucuccuguuuucuguguuucuugcccacauaauguuguugagccaugacagggucguugaaaguugcauggcagaggcugcagaacuugucugggucuaucaucucucuauucuggugcaaggcuuccaccuuaguggacugcugcuucagcuuuaaguucuuugcgugggucuuccccagguagugcgacugggccacgacaggggaggaaaaggucauguuacagauggggcagcacugguucuugucuuugcuucugcugcucugguaaugugccagcuucugggacucagaaauaagcaaggcgcagcaaaccuuacacuggguguuggugaagagacauugguucuucuggaucaugugcuccacugugcgacauucauugcagauaaauuuuccucuuggcaucucagucaauccaaggcacuccagguggaaagccccacagcacugagccucacauaacagcagcucacccaauuuuucacaauucugacagacauucuccuugagugcagcuccuccaccgcguucacccugcauuuuuuuagaggcaggcaucccgggaucguguucuacaccuuccucaacagucuccuuggggcuuguggccguccugugaggcauuaguucucccucugagccuggaaucucuuuugacgagucaucauuuuucacuuuuuuacacugcaucuuggcugcagcaugccucugucguuuucgcuuccuuggcuugucaaauaucuugguagugccuccaccaaaaucuuuugaauaagauguggcacaagauucaguuaugccauucuccaggugaccagcuucauagcacuuuuuagaaaggccaaggucccccuucuugggcauaaauccagggucuaaaucauuggauucaagaaguuucuuaguugguuuucuuugacguuuacuuucauaauuuccuggcguuuuaacuagcaauuccucagacucaagggcaggccguggagagacuuccggagccacaggcacagacaaggucagcugcggcaacucagcauguccaccuccaaguucugacugagccaaggggcccuccaaaaacggagccucccuuucaagaacuggaggcucuucuuugguugaaaucaaagaauucucguccaccugcuuguucugagcacuagaucgaccucgggcuagaaggcuuuccucuucacagcgggaacuuaccuugugcaccugcuccuguaccuucuuuuguuuuuucuuaggagcaaauaucugaucauauucuucuguauauuccaaaagccacuugcuuggcuuccuaaggcguuucuucucugaccgcacagcugguucagggagcucagccuguggugucaaacugggaauuccuggcuccuuuuccaugucaccaaugcuggcacuggauuuaucacaaacauuuaaccguggcccagcugaaucuaagcagucagcaugauuuugcucugucagugguuccucaaguaugcuugcugaaggaguucuaugcucuggaaacucaucccgccccuccugcacagggucacuaggaaguaagacccuaaaggcacacucagaguuuucuuucucuuuaaaucuguucaugcgcuuacgagguuuagugcgccuuugguuuaaacgcugccaccgcuuuuuaggcaccacuugauuuacaccauugaguucaucauucucacuguucauuacagaguccagcucugggccuuuuccguuuucaaaagagaguccuuuuucagaaauuuuaccaggaucagauugcuuaaccuugcuaucgaaaugcacaucagaaaaauggucaccaucuucacuuguuaaguggcccauuaucugaaggggauccucuuuacuaggaucuucugccccaccucucaaugaaccuccacguucucggucucccugcaguacagcaucaagagucacacuuggaagcugauucaguuuucuuuugcgcucggucuuuaaggcuuuacgguucacuguguucuuuaccauuugggcugaaaaagcaucucgcaauuuggaugaaggcuuugaucguccacaguugcgccuaguaacacagucugaacgacuuuuaccagaagcagggaggucucucuugucggacaguaagccagguagggaagcagacaacucgccagauaaugcagagucacccccacuagggcuaggauuggcggaguucugagugccaucucccuuuuucucugaauuguguguggagccuccugaaaccaaaaccuuagagacuccuacaggacuauuaguagaacaguccccacgaccaggacuccgguaagagaccagguuuugagcagucaucaaccgcugcuccuucgucuuacuaucaugcauaucuuucaacaucauuagcaauguacugaauuuguagucugguucaauagguaugugauucugacuagaagcagaagagaaaaguaaugguuuugauggcuuugauguuccagagucacugacauccucaccuaaggaucuguaagagaguuccuucaacucggauaaaacauguuucaccacugcuguuucuaugucacuugaaucccugguuuucucaugcauauuguucaguaguuuuagaccauccacuuucccacuuuuagaaaugcuggccaaaggagagccuuugguaucagaagagcagcauuucaaacugcacuccucauuuauaacuggggguucugccauaacuggauuuucuuuguguuugcacuuuauacuucggaacuugggcuguuugcuuuucgaauguaauagagcuugauuugcugccccacccuuuauuaacgaguucucacuggauaugcuugaugacagguugaauuuuggagagagagcaucauuuguaaaaucugacugggguuugugaacaagaguagaugccuucagaucagagagauuaaccugagacgucucgguuccaggcucugcacucuuaguacaacccauuaaguggucuguaugugaguuacuaaugagaggcuucuguuuugcuuuuacccuaguguuuguggcagcaaaccuagaauacuuuaucuuuucauuuuucugcauagauaacauguucucuguucuaucgaaagcaucuggaauuucaaggacacuguuaucagacucugagcuguguucuaugggauccaggucacugcuuccaucaucagaagugguacagauacuaauggaaucacuucgcuuuuccucaucaccugcuccaauauagcagagcuucacuuuugaaccacacaccaggcuucguugggguuuauucuucucucgagaacacuuugagaucaaagcacccucaggcaagcccaauaaagagucaccauuugaagucucaaauucuuucuuugcaguguuuuuuccacaggaagaaaacagaaaacuuccuggggcaguguuggacccugugaggcuauuugcuauccuggaaaguucauuagaggccugcguaucagauauauccccagagauaaaguuuaggccaagguucucuggaaucuuuccccuccguucaucuuuaugugcuucaaauuguauguggcccuuuuucacacuaguccuuuuuggauuaucagagcucuuucuggcucgagauuuagcgcaaggcuuuuccuucucaucugcagaauguucagaaucaaaagccagugauuucaaacagccauuaagcaacaggucauguucugacucaggaucauuugugcagucuucaaauggcauaucuucuucacuguccaacuugauugaaccaggaauacauuuucgguucuuugaccccuugggaacaucauacuguucugcaaguccaacacuggcuucccauuuacucaaaauuuucugaggaaccuuaugccuauauccuuuuucuuucuguuucccucuucuccuaaggacagguagcucuucgaauugaugucugccuucaaacaugacgauugcuuuuccagccacccaggcucucucagaaggaucuccaaaagccuccacguaguacugccgauagggccuccgguuggaaacuuucauuuuugaauguguguuaaucaacggaucagaacaaauccugcagggccaccaugggcgucucuugaauuuugcccagaugagaucuccaacuucauacuucaguggcguagacuuuuucuuagguugacacccucacaaccuuacaagacagcauuaucucgauuuugcagauaaagaaacugaggcucaaaaagguuaagucacaggcugggugcgguggcucaugccuguaaucccagcacuuugggaggccaaggugggagaaucacuggaggucaggaguucaagaccagccuggcaaacauggugaaaccccaucucuacuaaaaauacaaagauuagccgagcaugguggugugugccuguaaucccagcuacuugggagguugaggcagaagaaucgcuugaaccugggaggcggagguugcagugagccaagaucuuaccacugcauuccagccugggcaacggagugagauuccagaaauggcaauuccugugaaguagaugaugaugaaguuccagguaauucuagcauguuuccuaauguacugguacuggaaucuggaucauccgaaagggcuguccuugucuucaggggcaucuaaauucacuggauuggaaaagggcagcagacaauuucuucuggguaguucacaggucugauccauccugggccggcaucaac

SEQ ID NO: 2022 - RNA, 6877 nt, Homo sapiens
uuagauagagucuuguuauguugcccuggcuggagugcagugguuauucacaggcaugaucacagcauacuucaggcuggaacuccugggcuugaauggucuuucugccuuagccuccugagcagcugggacuauaggugcaugacgccgcaccuggccauaacacuccuucucagcucauuuuugagucaugaaaaaugcucuuucaagaaucaccaggccuaugauaagucccauggaacaaaccuaucacuguguaagagcugagcaggagaaaaccaucucuccucauacaccucauuuguucauucaauaaaaauucaugacacaccacuauggacaucaggaaguagagaugaauaaggcugggucucugcccuaagugauuagccuggaaagccauacuggacacaguguccauacuggccuccuugucuccuuuccugccccucccugcacuccuuuacauaacagccagaacaguucucucaaacauaaagcagauccccagcuuaaacccuuuaaagaccuucaugaggcccuaugugacaggagaagcaggagaaggugguggaugagaagaugaggcuguacugaguucagggcaccugaacucaagggagacuuucacagggugcucgacucugucccaacuccuaaagugacuacuggggacuacugaggucugaauggggugggggugaggggucaagacagacauacuagauccaauggcaauauggcucaaaacccuaggucuguuaaguuguagucuggcccaugagggaaauucuuuauuuggaugcuucagugaccaagagacagagcauuaggcacacacagaagcacacacauacacacaaacacacacacacacacacacacauccacacacaauaugcaaagcaaaggcauuucacaggugaagggauagggagugggggaaggaggccacgagagcagcuaggggcuucuuugacacaaugaagagaagccucugauggugacacuccuuggaauucucgucucaagguuacaaggaaaaaucuauccguguggacucagucccaggccauaaaacacagcaaagauagagaaaucuggguguggggccugggaaacgccuguuccucacuguagaaaccugcaucagcucucucuuucuuucccugggacccagaaaucacccgguggaugauggggaaggcuagcaccacagcaaacugggcaagugguccgcugcacaagggggaagagagggcuaguagggccgaggguagcaaugaaccucacagcuagcgggcaugaggcagucugccuuuaggggcagaacccucagggagacuugcauguggggcacuuucccguguaaccuagggucagagcaccucugauggaggaggggaaaggucccauccccauuggaguguccuaugaucucaguggacauggaggccgcccccagccccagcucguugccaacugcugcagauccuuagcaccauucaggaacuguggagggggcagcggggguagcaaugcuccgccaagauugugucacugcuccaggaggauacuucacaguuggcagaaaccugcgcaacuggccauaucuggucuaagacucaggaaagccugcaccuucugggggaaggcagagugucguauuagcuccaagcucccauguugcagccauuuccucuguuuccugcccugccccagguuuggcaugaaaguuccagguuuugcuggaaaugucuagggcccagagagaucucugcucuuuaguugcaagaacuggcccaaaacugaccuuuagaggaaagacagguggcaggggccucagcaccuaaggcccagagggguugggaaauggggaaagccacccuccaaacuaccaccccgcgagaccccgagucucucaauacccuugccuccccugucaugaccuacaggaccccugccaaaggggagcagcaggagugaauuagcccggaccaaugagaggcugucuguggcccaauccugccucaggcccguguacuuuccuggugagaacaacgagcaagagggagccaagggcugagcagucacgggaagcuggcucauggcuggcccaauaugggaugcugggcagaaucaccucuagucuuccaaggugguugagucuuucugaauggguugccuuugcauuggaaucuggcccagggaugaugccacuguuuuuggugacugguucuuguguuugaagccgcugacaugagcuugguacuguucuauggaguucagcacuaucuuacauguuuugcagggguagcccuuuccagcuggaaagucagugacagcaggguccgccagccgcccauagcgugccauuaguuugagcuuggucuccuguuuucuguguuucuugcccacauaauguuguugagccaugacagggucguugaaaguugcauggcagaggcugcagaacuugucugggucuaucaucucucuauucuggugcaaggcuuccaccuuaguggacugcugcuucagcuuuaaguucuuugcgugggucuuccccagguagugcgacugggccacgacaggggaggaaaaggucauguuacagauggggcagcacugguucuugucuuugcuucugcugcucugguaaugugccagcuucugggacucagaaauaagcaaggcgcagcaaaccuuacacuggguguuggugaagagacauugguucuucuggaucaugugcuccacugugcgacauucauugcagauaaauuuuccucuuggcaucucagucaauccaaggcacuccagguggaaagccccacagcacugagccucacauaacagcagcucacccaauuuuucacaauucugacagacauucuccuugagugcagcuccuccaccgcguucacccugcauuuuuuuagaggcaggcaucccgggaucguguucuacaccuuccucaacagucuccuuggggcuuguggccguccugugaggcauuaguucucccucugagccuggaaucucuuuugacgagucaucauuuuucacuuuuuuacacugcaucuuggcugcagcaugccucugucguuuucgcuuccuuggcuugucaaauaucuugguagugccuccaccaaaaucuuuugaauaagauguggcacaagauucaguuaugccauucuccaggugaccagcuucauagcacuuuuuagaaaggccaaggucccccuucuugggcauaaauccagggucuaaaucauuggauucaagaaguuucuuaguugguuuucuuugacguuuacuuucauaauuuccuggcguuuuaacuagcaauuccucagacucaagggcaggccguggagagacuuccggagccacaggcacagacaaggucagcugcggcaacucagcauguccaccuccaaguucugacugagccaaggggcccuccaaaaacggagccucccuuucaagaacuggaggcucuucuuugguugaaaucaaagaauucucguccaccugcuuguucugagcacuagaucgaccucgggcuagaaggcuuuccucuucacagcgggaacuuaccuugugcaccugcuccuguaccuucuuuuguuuuuucuuaggagcaaauaucugaucauauucuucuguauauuccaaaagccacuugcuuggcuuccuaaggcguuucuucucugaccgcacagcugguucagggagcucagccuguggugucaaacugggaauuccuggcuccuuuuccaugucaccaaugcuggcacuggauuuaucacaaacauuuaaccguggcccagcugaaucuaagcagucagcaugauuuugcucugucagugguuccucaaguaugcuugcugaaggaguucuaugcucuggaaacucaucccgccccuccugcacagggucacuaggaaguaagacccuaaaggcacacucagaguuuucuuucucuuuaaaucuguucaugcgcuuacgagguuuagugcgccuuugguuuaaacgcugccaccgcuuuuuaggcaccacuugauuuacaccauugaguucaucauucucacuguucauuacagaguccagcucugggccuuuuccguuuucaaaagagaguccuuuuucagaaauuuuaccaggaucagauugcuuaaccuugcuaucgaaaugcacaucagaaaaauggucaccaucuucacuuguuaaguggcccauuaucugaaggggauccucuuuacuaggaucuucugccccaccucucaaugaaccuccacguucucggucucccugcaguacagcaucaagagucacacuuggaagcugauucaguuuucuuuugcgcucggucuuuaaggcuuuacgguucacuguguucuuuaccauuugggcugaaaaagcaucucgcaauuuggaugaaggcuuugaucguccacaguugcgccuaguaacacagucugaacgacuuuuaccagaagcagggaggucucucuugucggacaguaagccagguagggaagcagacaacucgccagauaaugcagagucacccccacuagggcuaggauuggcggaguucugagugccaucucccuuuuucucugaauuguguguggagccuccugaaaccaaaaccuuagagacuccuacaggacuauuaguagaacaguccccacgaccaggacuccgguaagagaccagguuuugagcagucaucaaccgcugcuccuucgucuuacuaucaugcauaucuuucaacaucauuagcaauguacugaauuuguagucugguucaauagguaugugauucugacuagaagcagaagagaaaaguaaugguuuugauggcuuugauguuccagagucacugacauccucaccuaaggaucuguaagagaguuccuucaacucggauaaaacauguuucaccacugcuguuucuaugucacuugaaucccugguuuucucaugcauauuguucaguaguuuuagaccauccacuuucccacuuuuagaaaugcuggccaaaggagagccuuugguaucagaagagcagcauuucaaacugcacuccucauuuauaacuggggguucugccauaacuggauuuucuuuguguuugcacuuuauacuucggaacuugggcuguuugcuuuucgaauguaauagagcuugauuugcugccccacccuuuauuaacgaguucucacuggauaugcuugaugacagguugaauuuuggagagagagcaucauuuguaaaaucugacugggguuugugaacaagaguagaugccuucagaucagagagauuaaccugagacgucucgguuccaggcucugcacucuuaguacaacccauuaaguggucuguaugugaguuacuaaugagaggcuucuguuuugcuuuuacccuaguguuuguggcagcaaaccuagaauacuuuaucuuuucauuuuucugcauagauaacauguucucuguucuaucgaaagcaucuggaauuucaaggacacuguuaucagacucugagcuguguucuaugggauccaggucacugcuuccaucaucagaagugguacagauacuaauggaaucacuucgcuuuuccucaucaccugcuccaauauagcagagcuucacuuuugaaccacacaccaggcuucguugggguuuauucuucucucgagaacacuuugagaucaaagcacccucaggcaagcccaauaaagagucaccauuugaagucucaaauucuuucuuugcaguguuuuuuccacaggaagaaaacagaaaacuuccuggggcaguguuggacccugugaggcuauuugcuauccuggaaaguucauuagaggccugcguaucagauauauccccagagauaaaguuuaggccaagguucucuggaaucuuuccccuccguucaucuuuaugugcuucaaauuguauguggcccuuuuucacacuaguccuuuuuggauuaucagagcucuuucuggcucgagauuuagcgcaaggcuuuuccuucucaucugcagaauguucagaaucaaaagccagugauuucaaacagccauuaagcaacaggucauguucugacucaggaucauuugugcagucuucaaauggcauaucuucuucacuguccaacuugauugaaccaggaauacauuuucgguucuuugaccccuugggaacaucauacuguucugcaaguccaacacuggcuucccauuuacucaaaauuuucugaggaaccuuaugccuauauccuuuuucuuucuguuucccucuucuccuaaggacagguagcucuucgaauugaugucugccuucaaacaugacgauugcuuuuccagccacccaggcucucucagaaggaucuccaaaagccuccacguaguacugccgauagggccuccgguuggaaacuuucauuuuugaauguguguuaaucaacggaucagaacaaauccugcagggccaccaugggcgucucuugaauuuugcccagaugagaucuccaacuucauacuucaguggcguagacuuuuucuuagguugacaaaauggcaauuccugugaaguagaugaugaugaaguuccagguaauucuagcauguuuccuaauguacugguacuggaaucuggaucauccgaaagggcuguccuugucuucaggggcaucuaaauucacuggauuggaaaagggcagcagacaauuucuucuggguaguucacaggucugauccauccugggccggcaucaaccugggggcuugggcuggggucuucgaggccucaggccccgagcagacgcggccgcaggcgaacccccuacccggcc

SEQ ID NO: 2023 - RNA, 6693 nt, Homo sapiens
uuagauagagucuuguuauguugcccuggcuggagugcagugguuauucacaggcaugaucacagcauacuucaggcuggaacuccugggcuugaauggucuuucugccuuagccuccugagcagcugggacuauaggugcaugacgccgcaccuggccauaacacuccuucucagcucauuuuugagucaugaaaaaugcucuuucaagaaucaccaggccuaugauaagucccauggaacaaaccuaucacuguguaagagcugagcaggagaaaaccaucucuccucauacaccucauuuguucauucaauaaaaauucaugacacaccacuauggacaucaggaaguagagaugaauaaggcugggucucugcccuaagugauuagccuggaaagccauacuggacacaguguccauacuggccuccuugucuccuuuccugccccucccugcacuccuuuacauaacagccagaacaguucucucaaacauaaagcagauccccagcuuaaacccuuuaaagaccuucaugaggcccuaugugacaggagaagcaggagaaggugguggaugagaagaugaggcuguacugaguucagggcaccugaacucaagggagacuuucacagggugcucgacucugucccaacuccuaaagugacuacuggggacuacugaggucugaauggggugggggugaggggucaagacagacauacuagauccaauggcaauauggcucaaaacccuaggucuguuaaguuguagucuggcccaugagggaaauucuuuauuuggaugcuucagugaccaagagacagagcauuaggcacacacagaagcacacacauacacacaaacacacacacacacacacacacauccacacacaauaugcaaagcaaaggcauuucacaggugaagggauagggagugggggaaggaggccacgagagcagcuaggggcuucuuugacacaaugaagagaagccucugauggugacacuccuuggaauucucgucucaagguuacaaggaaaaaucuauccguguggacucagucccaggccauaaaacacagcaaagauagagaaaucuggguguggggccugggaaacgccuguuccucacuguagaaaccugcaucagcucucucuuucuuucccugggacccagaaaucacccgguggaugauggggaaggcuagcaccacagcaaacugggcaagugguccgcugcacaagggggaagagagggcuaguagggccgaggguagcaaugaaccucacagcuagcgggcaugaggcagucugccuuuaggggcagaacccucagggagacuugcauguggggcacuuucccguguaaccuagggucagagcaccucugauggaggaggggaaaggucccauccccauuggaguguccuaugaucucaguggacauggaggccgcccccagccccagcucguugccaacugcugcagauccuuagcaccauucaggaacuguggagggggcagcggggguagcaaugcuccgccaagauugugucacugcuccaggaggauacuucacaguuggcagaaaccugcgcaacuggccauaucuggucuaagacucaggaaagccugcaccuucugggggaaggcagagugucguauuagcuccaagcucccauguugcagccauuuccucuguuuccugcccugccccagguuuggcaugaaaguuccagguuuugcuggaaaugucuagggcccagagagaucucugcucuuuaguugcaagaacuggcccaaaacugaccuuuagaggaaagacagguggcaggggccucagcaccuaaggcccagagggguugggaaauggggaaagccacccuccaaacuaccaccccgcgagaccccgagucucucaauacccuugccuccccugucaugaccuacaggaccccugccaaaggggagcagcaggagugaauuagcccggaccaaugagaggcugucuguggcccaauccugccucaggcccguguacuuuccuggugagaacaacgagcaagagggagccaagggcugagcagucacgggaagcuggcucauggcuggcccaauaugggaugcugggcagaaucaccucuagucuuccaaggugguugagucuuucugaauggguugccuuugcauuggaaucuggcccagggaugaugccacuguuuuuggugacugguucuuguguuugaagccgcugacaugagcuugguacuguucuauggaguucagcacuaucuuacauguuuugcagggguagcccuuuccagcuggaaagucagugacagcaggguccgccagccgcccauagcgugccauuaguuugagcuuggucuccuguuuucuguguuucuugcccacauaauguuguugagccaugacagggucguugaaaguugcauggcagaggcugcagaacuugucugggucuaucaucucucuauucuggugcaaggcuuccaccuuaguggacugcugcuucagcuuuaaguucuuugcgugggucuuccccagguagugcgacugggccacgacaggggaggaaaaggucauguuacagauggggcagcacugguucuugucuuugcuucugcugcucugguaaugugccagcuucugggacucagaaauaagcaaggcgcagcaaaccuuacacuggguguuggugaagagacauugguucuucuggaucaugugcuccacugguucagggagcucagccuguggugucaaacugggaauuccuggcuccuuuuccaugucaccaaugcuggcacuggauuuaucacaaacauuuaaccguggcccagcugaaucuaagcagucagcaugauuuugcucugucagugguuccucaaguaugcuugcugaaggaguucuaugcucuggaaacucaucccgccccuccugcacagggucacuaggaaguaagacccuaaaggcacacucagaguuuucuuucucuuuaaaucuguucaugcgcuuacgagguuuagugcgccuuugguuuaaacgcugccaccgcuuuuuaggcaccacuugauuuacaccauugaguucaucauucucacuguucauuacagaguccagcucugggccuuuuccguuuucaaaagagaguccuuuuucagaaauuuuaccaggaucagauugcuuaaccuugcuaucgaaaugcacaucagaaaaauggucaccaucuucacuuguuaaguggcccauuaucugaaggggauccucuuuacuaggaucuucugccccaccucucaaugaaccuccacguucucggucucccugcaguacagcaucaagagucacacuuggaagcugauucaguuuucuuuugcgcucggucuuuaaggcuuuacgguucacuguguucuuuaccauuugggcugaaaaagcaucucgcaauuuggaugaaggcuuugaucguccacaguugcgccuaguaacacagucugaacgacuuuuaccagaagcagggaggucucucuugucggacaguaagccagguagggaagcagacaacucgccagauaaugcagagucacccccacuagggcuaggauuggcggaguucugagugccaucucccuuuuucucugaauuguguguggagccuccugaaaccaaaaccuuagagacuccuacaggacuauuaguagaacaguccccacgaccaggacuccgguaagagaccagguuuugagcagucaucaaccgcugcuccuucgucuuacuaucaugcauaucuuucaacaucauuagcaauguacugaauuuguagucugguucaauagguaugugauucugacuagaagcagaagagaaaaguaaugguuuugauggcuuugauguuccagagucacugacauccucaccuaaggaucuguaagagaguuccuucaacucggauaaaacauguuucaccacugcuguuucuaugucacuugaaucccugguuuucucaugcauauuguucaguaguuuuagaccauccacuuucccacuuuuagaaaugcuggccaaaggagagccuuugguaucagaagagcagcauuucaaacugcacuccucauuuauaacuggggguucugccauaacuggauuuucuuuguguuugcacuuuauacuucggaacuugggcuguuugcuuuucgaauguaauagagcuugauuugcugccccacccuuuauuaacgaguucucacuggauaugcuugaugacagguugaauuuuggagagagagcaucauuuguaaaaucugacugggguuugugaacaagaguagaugccuucagaucagagagauuaaccugagacgucucgguuccaggcucugcacucuuaguacaacccauuaaguggucuguaugugaguuacuaaugagaggcuucuguuuugcuuuuacccuaguguuuguggcagcaaaccuagaauacuuuaucuuuucauuuuucugcauagauaacauguucucuguucuaucgaaagcaucuggaauuucaaggacacuguuaucagacucugagcuguguucuaugggauccaggucacugcuuccaucaucagaagugguacagauacuaauggaaucacuucgcuuuuccucaucaccugcuccaauauagcagagcuucacuuuugaaccacacaccaggcuucguugggguuuauucuucucucgagaacacuuugagaucaaagcacccucaggcaagcccaauaaagagucaccauuugaagucucaaauucuuucuuugcaguguuuuuuccacaggaagaaaacagaaaacuuccuggggcaguguuggacccugugaggcuauuugcuauccuggaaaguucauuagaggccugcguaucagauauauccccagagauaaaguuuaggccaagguucucuggaaucuuuccccuccguucaucuuuaugugcuucaaauuguauguggcccuuuuucacacuaguccuuuuuggauuaucagagcucuuucuggcucgagauuuagcgcaaggcuuuuccuucucaucugcagaauguucagaaucaaaagccagugauuucaaacagccauuaagcaacaggucauguucugacucaggaucauuugugcagucuucaaauggcauaucuucuucacuguccaacuugauugaaccaggaauacauuuucgguucuuugaccccuugggaacaucauacuguucugcaaguccaacacuggcuucccauuuacucaaaauuuucugaggaaccuuaugccuauauccuuuuucuuucuguuucccucuucuccuaaggacagguagcucuucgaauugaugucugccuucaaacaugacgauugcuuuuccagccacccaggcucucucagaaggaucuccaaaagccuccacguaguacugccgauagggccuccgguuggaaacuuucauuuuugaauguguguuaaucaacggaucagaacaaauccugcagggccaccaugggcgucucuugaauuuugcccagaugagaucuccaacuucauacuucaguggcguagacuuuuucuuagguugacaaaauggcaauuccugugaaguagaugaugaugaaguuccagguaauucuagcauguuuccuaauguacugguacuggaaucuggaucauccugaaaagauaaauuuauugaguuuaauugcucuucuauuguaauguuugugucuccuagugaaaagggggcugggagaagggcugcuuuuucauugcugccguccacuucauuucuuugcuuauuuuucuguguuucagucugaggagcuaauggcaagaauggcgauuugacugcaccgugucuacucucuggugugcugucuuguucacuucccauggccacuuuuacaccauucucugauuuagucucauaauugcagguggcauuggucugaguuuccucaaagaucuccucuauacucucauccucugugacuggcuguucuggguccauuucagaaucuacaucugcaucguccacacaaguaaaauucucaaagugcagaaagccauucuugauagucuuuguuacuuuuaccuggaguucaggggaguuauuacaagaggguuccuguuucauagcaagugcuguaggaccaccaggacucaaggaagugcaaacaauuggcgucugagcucuugaaucacuuuuuucagggucuugaaaggauucugauccaucagcagacccauuuaaauacucuacauugaucauggaggccaaauccuguagucuccgcaguggaauguaacaagauggagaaucuuguccauaagcauuuugggauguuccacugacagucgauaacugcauaguacacccauuaaguggcucagaaaaauuggauugaccauuaccgaaagggcuguccuugucuucaggggcaucuaaauucacuggauuggaaaagggcagcagacaauuucuucuggguaguucacaggucugauccauccugggccggcaucaaccgugccccgcgcccccucccgggccagcuggggggagggggugacccucauuacacuggggugcgagcggagcgguggggagagagcggggccgcucgccgcaccccccuccccccgcguc

SEQ ID NO: 2024 - RNA, 7900 nt, Homo sapiens
uuagauagagucuuguuauguugcccuggcuggagugcagugguuauucacaggcaugaucacagcauacuucaggcuggaacuccugggcuugaauggucuuucugccuuagccuccugagcagcugggacuauaggugcaugacgccgcaccuggccauaacacuccuucucagcucauuuuugagucaugaaaaaugcucuuucaagaaucaccaggccuaugauaagucccauggaacaaaccuaucacuguguaagagcugagcaggagaaaaccaucucuccucauacaccucauuuguucauucaauaaaaauucaugacacaccacuauggacaucaggaaguagagaugaauaaggcugggucucugcccuaagugauuagccuggaaagccauacuggacacaguguccauacuggccuccuugucuccuuuccugccccucccugcacuccuuuacauaacagccagaacaguucucucaaacauaaagcagauccccagcuuaaacccuuuaaagaccuucaugaggcccuaugugacaggagaagcaggagaaggugguggaugagaagaugaggcuguacugaguucagggcaccugaacucaagggagacuuucacagggugcucgacucugucccaacuccuaaagugacuacuggggacuacugaggucugaauggggugggggugaggggucaagacagacauacuagauccaauggcaauauggcucaaaacccuaggucuguuaaguuguagucuggcccaugagggaaauucuuuauuuggaugcuucagugaccaagagacagagcauuaggcacacacagaagcacacacauacacacaaacacacacacacacacacacacauccacacacaauaugcaaagcaaaggcauuucacaggugaagggauagggagugggggaaggaggccacgagagcagcuaggggcuucuuugacacaaugaagagaagccucugauggugacacuccuuggaauucucgucucaagguuacaaggaaaaaucuauccguguggacucagucccaggccauaaaacacagcaaagauagagaaaucuggguguggggccugggaaacgccuguuccucacuguagaaaccugcaucagcucucucuuucuuucccugggacccagaaaucacccgguggaugauggggaaggcuagcaccacagcaaacugggcaagugguccgcugcacaagggggaagagagggcuaguagggccgaggguagcaaugaaccucacagcuagcgggcaugaggcagucugccuuuaggggcagaacccucagggagacuugcauguggggcacuuucccguguaaccuagggucagagcaccucugauggaggaggggaaaggucccauccccauuggaguguccuaugaucucaguggacauggaggccgcccccagccccagcucguugccaacugcugcagauccuuagcaccauucaggaacuguggagggggcagcggggguagcaaugcuccgccaagauugugucacugcuccaggaggauacuucacaguuggcagaaaccugcgcaacuggccauaucuggucuaagacucaggaaagccugcaccuucugggggaaggcagagugucguauuagcuccaagcucccauguugcagccauuuccucuguuuccugcccugccccagguuuggcaugaaaguuccagguuuugcuggaaaugucuagggcccagagagaucucugcucuuuaguugcaagaacuggcccaaaacugaccuuuagaggaaagacagguggcaggggccucagcaccuaaggcccagagggguugggaaauggggaaagccacccuccaaacuaccaccccgcgagaccccgagucucucaauacccuugccuccccugucaugaccuacaggaccccugccaaaggggagcagcaggagugaauuagcccggaccaaugagaggcugucuguggcccaauccugccucaggcccguguacuuuccuggugagaacaacgagcaagagggagccaagggcugagcagucacgggaagcuggcucauggcuggcccaauaugggaugcugggcagaaucaccucuagucuuccaaggugguugagucuuucugaauggguugccuuugcauuggaaucuggcccagggaugaugccacuguuuuuggugacugguucuuguguuugaagccgcugacaugagcuugguacuguucuauggaguucagcacuaucuuacauguuuugcagggguagcccuuuccagcuggaaagucagugacagcaggguccgccagccgcccauagcgugccauuaguuugagcuuggucuccuguuuucuguguuucuugcccacauaauguuguugagccaugacagggucguugaaaguugcauggcagaggcugcagaacuugucugggucuaucaucucucuauucuggugcaaggcuuccaccuuaguggacugcugcuucagcuuuaaguucuuugcgugggucuuccccagguagugcgacugggccacgacaggggaggaaaaggucauguuacagauggggcagcacugguucuugucuuugcuucugcugcucugguaaugugccagcuucugggacucagaaauaagcaaggcgcagcaaaccuuacacuggguguuggugaagagacauugguucuucuggaucaugugcuccacuuuuuuauaugucccauccacuccuuugcccaucuuauccuugcugcucacgucacccuccauguaagggaagacucgggccuggugaguccacaaauagucauuagauccaaaaaagaggacugggaacucucccacaucaugucucaucuuaucaauguuggaaggaacagcucgaggauggcagaucucagcuggccaccaccuguaucguccaacuuuuacccagacaaucucccuguaguguggcuuuuugccugcuuuacagucauugcaauaccaguuuccuucagggauaucaauguucaggcauucacgaugaaaagcagcagggcaagaaucacagcacagaaggcugccuccuucugagcacacaaagcaccagcuaacauuaacaugcucaugauuucggcagccccgccuagggguaaagugauuagggcagaugauacuauuagaugcaaggaucuuugacccagcagccaggcaaaagucauuggcgugguaugccacaggacagcggacacagcgcaucaaccgaccuuuagaugcagaaacauuggcuggauuagcagcaugacagguuauacagauguggagggagcaccggaagcccuuguucugcauaacaguggguggguacuucuggacacacucuucaugguaaaacuuuccacacaaggguagaaggcaccuuuuaacaucuuccccacucugcuuacauacaaaacagguauggauuccugugcgacauucauugcagauaaauuuuccucuuggcaucucagucaauccaaggcacuccagguggaaagccccacagcacugagccucacauaacagcagcucacccaauuuuucacaauucugacagacauucuccuugagugcagcuccuccaccgcguucacccugcauuuuuuuagaggcaggcaucccgggaucguguucuacaccuuccucaacagucuccuuggggcuuguggccguccugugaggcauuaguucucccucugagccuggaaucucuuuugacgagucaucauuuuucacuuuuuuacacugcaucuuggcugcagcaugccucugucguuuucgcuuccuuggcuugucaaauaucuugguagugccuccaccaaaaucuuuugaauaagauguggcacaagauucaguuaugccauucuccaggugaccagcuucauagcacuuuuuagaaaggccaaggucccccuucuugggcauaaauccagggucuaaaucauuggauucaagaaguuucuuaguugguuuucuuugacguuuacuuucauaauuuccuggcguuuuaacuagcaauuccucagacucaagggcaggccguggagagacuuccggagccacaggcacagacaaggucagcugcggcaacucagcauguccaccuccaaguucugacugagccaaggggcccuccaaaaacggagccucccuuucaagaacuggaggcucuucuuugguugaaaucaaagaauucucguccaccugcuuguucugagcacuagaucgaccucgggcuagaaggcuuuccucuucacagcgggaacuuaccuugugcaccugcuccuguaccuucuuuuguuuuuucuuaggagcaaauaucugaucauauucuucuguauauuccaaaagccacuugcuuggcuuccuaaggcguuucuucucugaccgcacagcugguucagggagcucagccuguggugucaaacugggaauuccuggcuccuuuuccaugucaccaaugcuggcacuggauuuaucacaaacauuuaaccguggcccagcugaaucuaagcagucagcaugauuuugcucugucagugguuccucaaguaugcuugcugaaggaguucuaugcucuggaaacucaucccgccccuccugcacagggucacuaggaaguaagacccuaaaggcacacucagaguuuucuuucucuuuaaaucuguucaugcgcuuacgagguuuagugcgccuuugguuuaaacgcugccaccgcuuuuuaggcaccacuugauuuacaccauugaguucaucauucucacuguucauuacagaguccagcucugggccuuuuccguuuucaaaagagaguccuuuuucagaaauuuuaccaggaucagauugcuuaaccuugcuaucgaaaugcacaucagaaaaauggucaccaucuucacuuguuaaguggcccauuaucugaaggggauccucuuuacuaggaucuucugccccaccucucaaugaaccuccacguucucggucucccugcaguacagcaucaagagucacacuuggaagcugauucaguuuucuuuugcgcucggucuuuaaggcuuuacgguucacuguguucuuuaccauuugggcugaaaaagcaucucgcaauuuggaugaaggcuuugaucguccacaguugcgccuaguaacacagucugaacgacuuuuaccagaagcagggaggucucucuugucggacaguaagccagguagggaagcagacaacucgccagauaaugcagagucacccccacuagggcuaggauuggcggaguucugagugccaucucccuuuuucucugaauuguguguggagccuccugaaaccaaaaccuuagagacuccuacaggacuauuaguagaacaguccccacgaccaggacuccgguaagagaccagguuuugagcagucaucaaccgcugcuccuucgucuuacuaucaugcauaucuuucaacaucauuagcaauguacugaauuuguagucugguucaauagguaugugauucugacuagaagcagaagagaaaaguaaugguuuugauggcuuugauguuccagagucacugacauccucaccuaaggaucuguaagagaguuccuucaacucggauaaaacauguuucaccacugcuguuucuaugucacuugaaucccugguuuucucaugcauauuguucaguaguuuuagaccauccacuuucccacuuuuagaaaugcuggccaaaggagagccuuugguaucagaagagcagcauuucaaacugcacuccucauuuauaacuggggguucugccauaacuggauuuucuuuguguuugcacuuuauacuucggaacuugggcuguuugcuuuucgaauguaauagagcuugauuugcugccccacccuuuauuaacgaguucucacuggauaugcuugaugacagguugaauuuuggagagagagcaucauuuguaaaaucugacugggguuugugaacaagaguagaugccuucagaucagagagauuaaccugagacgucucgguuccaggcucugcacucuuaguacaacccauuaaguggucuguaugugaguuacuaaugagaggcuucuguuuugcuuuuacccuaguguuuguggcagcaaaccuagaauacuuuaucuuuucauuuuucugcauagauaacauguucucuguucuaucgaaagcaucuggaauuucaaggacacuguuaucagacucugagcuguguucuaugggauccaggucacugcuuccaucaucagaagugguacagauacuaauggaaucacuucgcuuuuccucaucaccugcuccaauauagcagagcuucacuuuugaaccacacaccaggcuucguugggguuuauucuucucucgagaacacuuugagaucaaagcacccucaggcaagcccaauaaagagucaccauuugaagucucaaauucuuucuuugcaguguuuuuuccacaggaagaaaacagaaaacuuccuggggcaguguuggacccugugaggcuauuugcuauccuggaaaguucauuagaggccugcguaucagauauauccccagagauaaaguuuaggccaagguucucuggaaucuuuccccuccguucaucuuuaugugcuucaaauuguauguggcccuuuuucacacuaguccuuuuuggauuaucagagcucuuucuggcucgagauuuagcgcaaggcuuuuccuucucaucugcagaauguucagaaucaaaagccagugauuucaaacagccauuaagcaacaggucauguucugacucaggaucauuugugcagucuucaaauggcauaucuucuucacuguccaacuugauugaaccaggaauacauuuucgguucuuugaccccuugggaacaucauacuguucugcaaguccaacacuggcuucccauuuacucaaaauuuucugaggaaccuuaugccuauauccuuuuucuuucuguuucccucuucuccuaaggacagguagcucuucgaauugaugucugccuucaaacaugacgauugcuuuuccagccacccaggcucucucagaaggaucuccaaaagccuccacguaguacugccgauagggccuccgguuggaaacuuucauuuuugaauguguguuaaucaacggaucagaacaaauccugcagggccaccaugggcgucucuugaauuuugcccagaugagaucuccaacuucauacuucaguggcguagacuuuuucuuagguugacacccucacaaccuuacaagacagcauuaucucgauuuugcagauaaagaaacugaggcucaaaaagguuaagucacaggcugggugcgguggcucaugccuguaaucccagcacuuugggaggccaaggugggagaaucacuggaggucaggaguucaagaccagccuggcaaacauggugaaaccccaucucuacuaaaaauacaaagauuagccgagcaugguggugugugccuguaaucccagcuacuugggagguugaggcagaagaaucgcuugaaccugggaggcggagguugcagugagccaagaucuuaccacugcauuccagccugggcaacggagugagauuccagaaauggcaauuccugugaaguagaugaugaugaaguuccagguaauucuagcauguuuccuaauguacugguacuggaaucuggaucauccgaaagggcuguccuugucuucaggggcaucuaaauucacuggauuggaaaagggcagcagacaauuucuucuggguaguucacaggucugauccauccugggccggcaucaac

SEQ ID NO: 2025 - RNA, 3215 nt, Homo sapiens
aaacaaguuuuauuuugagaacauuuuaaaauacagaaaaaguacacagggucauaccauacccagcugcucagaauugacaauuguucauuaccauuucuuuuuuuuaaguugaaacagggucucauuauguugcccaggcuggucuugaacuccugggcucaagcaaucugccugucucggccuccaaaagugcugggaguacaggcuugagccaccgcaccuggccuauuuuaucauucuuuuccaacccuuuucuaccuuggcuucuccacaggcuccagggaggucuagcuuggcuggucaaaacggaggugacauugacagaaagugagugauuaaagguugggugucagagucggacagaucuggguuuuuuuuggagacagagucuuacucugucgcucaggcuggaaugcaguggcacgaucuaggcucacugcaaccaccaccuccuggguucaagugauucuccugccucagccaccugaguagcugggauuacgggugugugccaccacgcccagcuaauuuuuguauuuuugguagagacgggguuuugccauuguuggccaggcuugaacuccuggccacaggagaucugcuggccucagucucccaaagggcugggauuauaggugugagccaccuugcccagugacagaucuggguuugagucccgaaaacucuuuguggucacggacaaaucacuuaaccucaagccucaguuucaucuucugugaaaugggaauaauacaucuuccgugaggacucaguaugaugauguaugucaagcacaaugccagugccuggcauauaccccuugcucacugaagaguagccaauaugaauauuugcagcuaugggccugggacccacccaaaagcaugggcaacacccuccugugaccgaaagggagggacugugagaaugaccccuccucagccuucauuucuccucauuucccacccguccucaauucuggguacaucugucuccaguuuauacucugaagacagcagggcugugaguuacagguugcccagggcauuuuuguggaggcagagaguuuagagcugaugacagccugggagagcucuggggaggcuuccaaaccaaaguggauggaggggaacuggggaggagggaucugagugagguuagucccggcuaaccucacucaguucuaacuacccugggcugguccuggggcuucucacagccucaguagcaccccccguccccuuauucacuggucucggauacucuagaccuguggccuggcuugcuaggacaggggcuuucaggcuuugccagacucagccucucuagacuugggccuacaagccucacacccaccggguguuggcaugcacgucuguuuggaggaggaccgacagcugggaaguggcagaggcugggcuggaagggugagaggguugguggucuccagggaagcgggaaguaaacucgugcccuucuguacuuugcccggugcccuggaccauggaggguuucguuggggugugaauaacagaaaccuaagugagcagggccuaaaugaaacaguguauccaucucucacuuagccccacguccagagguggguguagguuggucugaagucaggguugaggacucguccguucuccagguuuuucucucauggucgcaagauguuggcuucagcugcugccgucacauuugugcagaggcaggaggaaggaagaaguuccagagaguugaguuuccacacagcaacucccaauuucauuuccuuggccagacugugacacggccaccccuagcucuagucuuccaaggugguugagucuuucugaauggguugccuuugcauuggaaucuggcccagggaugaugccacuguuuuuggugacugguucuuguguuugaagccgcugacaugagcuugguacuguucuauggaguucagcacuaucuuacauguuuugcagggguagcccuuuccagcuggaaagucagugacagcaggguccgccagccgcccauagcgugccauuaguuugagcuuggucuccuguuuucuguguuucuugcccacauaauguuguugagccaugacagggucguugaaaguugcauggcagaggcugcagaacuugucugggucuaucaucucucuauucuggugcaaggcuuccaccuuaguggacugcugcuucagcuuuaaguucuuugcgugggucuuccccagguagugcgacugggccacgacaggggaggaaaaggucauguuacagauggggcagcacugguucuugucuuugcuucugcugcucuucugaucugagucuagcuucuucguuucccccuuuaaugucuccauuccauggauugcuagguaucucuucacuuuguuggcauguuuuuugcucugguaaugugccagcuucugggacucagaaauaagcaaggcgcagcaaaccuuacacuggguguuggugaagagacauugguucuucuggaucaugugcuccacuuucauuuuugaauguguguuaaucaacggaucagaacaaauccugcagggccaccaugggcgucucuugaauuuugcccagaugagaucuccaacuucauacuucaguggcguagacuuuuucuuagguugacacccucacaaccuuacaagacagcauuaucucgauuuugcagauaaagaaacugaggcucaaaaagguuaagucacaggcugggugcgguggcucaugccuguaaucccagcacuuugggaggccaaggugggagaaucacuggaggucaggaguucaagaccagccuggcaaacauggugaaaccccaucucuacuaaaaauacaaagauuagccgagcaugguggugugugccuguaaucccagcuacuugggagguugaggcagaagaaucgcuugaaccugggaggcggagguugcagugagccaagaucuuaccacugcauuccagccugggcaacggagugagauuccagaaauggcaauuccugugaaguagaugaugaugaaguuccagguaauucuagcauguuuccuaauguacugguacuggaaucuggaucauccgaaagggcuguccuugucuucaggggcaucuaaauucacuggauuggaaaagggcagcagacaauuucuucuggguaguucacaggucugauccauccugggccggcaucaac

SEQ ID NO: 2026 - RNA, 8167 nt, Homo sapiens
aaacaaguuuuauuuugagaacauuuuaaaauacagaaaaaguacacagggucauaccauacccagcugcucagaauugacaauuguucauuaccauuucuuuuuuuuaaguugaaacagggucucauuauguugcccaggcuggucuugaacuccugggcucaagcaaucugccugucucggccuccaaaagugcugggaguacaggcuugagccaccgcaccuggccuauuuuaucauucuuuuccaacccuuuucuaccuuggcuucuccacaggcuccagggaggucuagcuuggcuggucaaaacggaggugacauugacagaaagugagugauuaaagguugggugucagagucggacagaucuggguuuuuuuuggagacagagucuuacucugucgcucaggcuggaaugcaguggcacgaucuaggcucacugcaaccaccaccuccuggguucaagugauucuccugccucagccaccugaguagcugggauuacgggugugugccaccacgcccagcuaauuuuuguauuuuugguagagacgggguuuugccauuguuggccaggcuugaacuccuggccacaggagaucugcuggccucagucucccaaagggcugggauuauaggugugagccaccuugcccagugacagaucuggguuugagucccgaaaacucuuuguggucacggacaaaucacuuaaccucaagccucaguuucaucuucugugaaaugggaauaauacaucuuccgugaggacucaguaugaugauguaugucaagcacaaugccagugccuggcauauaccccuugcucacugaagaguagccaauaugaauauuugcagcuaugggccugggacccacccaaaagcaugggcaacacccuccugugaccgaaagggagggacugugagaaugaccccuccucagccuucauuucuccucauuucccacccguccucaauucuggguacaucugucuccaguuuauacucugaagacagcagggcugugaguuacagguugcccagggcauuuuuguggaggcagagaguuuagagcugaugacagccugggagagcucuggggaggcuuccaaaccaaaguggauggaggggaacuggggaggagggaucugagugagguuagucccggcuaaccucacucaguucuaacuacccugggcugguccuggggcuucucacagccucaguagcaccccccguccccuuauucacuggucucggauacucuagaccuguggccuggcuugcuaggacaggggcuuucaggcuuugccagacucagccucucuagacuugggccuacaagccucacacccaccggguguuggcaugcacgucuguuuggaggaggaccgacagcugggaaguggcagaggcugggcuggaagggugagaggguugguggucuccagggaagcgggaaguaaacucgugcccuucuguacuuugcccggugcccuggaccauggaggguuucguuggggugugaauaacagaaaccuaagugagcagggccuaaaugaaacaguguauccaucucucacuuagccccacguccagagguggguguagguuggucugaagucaggguugaggacucguccguucuccagguuuuucucucauggucgcaagauguuggcuucagcugcugccgucacauuugugcagaggcaggaggaaggaagaaguuccagagaguugaguuuccacacagcaacucccaauuucauuuccuuggccagacugugacacggccaccccuagcucuagucuuccaaggugguugagucuuucugaauggguugccuuugcauuggaaucuggcccagggaugaugccacuguuuuuggugacugguucuuguguuugaagccgcugacaugagcuugguacuguucuauggaguucagcacuaucuuacauguuuugcagggguagcccuuuccagcuggaaagucagugacagcaggguccgccagccgcccauagcgugccauuaguuugagcuuggucuccuguuuucuguguuucuugcccacauaauguuguugagccaugacagggucguugaaaguugcauggcagaggcugcagaacuugucugggucuaucaucucucuauucuggugcaaggcuuccaccuuaguggacugcugcuucagcuuuaaguucuuugcgugggucuuccccagguagugcgacugggccacgacaggggaggaaaaggucauguuacagauggggcagcacugguucuugucuuugcuucugcugcucuucugaucugagucuagcuucuucguuucccccuuuaaugucuccauuccauggauugcuagguaucucuucacuuuguuggcauguuuuuugcucugguaaugugccagcuucugggacucagaaauaagcaaggcgcagcaaaccuuacacuggguguuggugaagagacauugguucuucuggaucaugugcuccacuuuuuuauaugucccauccacuccuuugcccaucuuauccuugcugcucacgucacccuccauguaagggaagacucgggccuggugaguccacaaauagucauuagauccaaaaaagaggacugggaacucucccacaucaugucucaucuuaucaauguuggaaggaacagcucgaggauggcagaucucagcuggccaccaccuguaucguccaacuuuuacccagacaaucucccuguaguguggcuuuuugccugcuuuacagucauugcaauaccaguuuccuucagggauaucaauguucaggcauucacgaugaaaagcagcagggcaagaaucacagcacagaaggcugccuccuucugagcacacaaagcaccagcuaacauuaacaugcucaugauuucggcagccccgccuagggguaaagugauuagggcagaugauacuauuagaugcaaggaucuuugacccagcagccaggcaaaagucauuggcgugguaugccacaggacagcggacacagcgcaucaaccgaccuuuagaugcagaaacauuggcuggauuagcagcaugacagguuauacagauguggagggagcaccggaagcccuuguucugcauaacaguggguggguacuucuggacacacucuucaugguaaaacuuuccacacaaggguagaaggcaccuuuuaacaucuuccccacucugcuuacauacaaaacagguauggauuccugugcgacauucauugcagauaaauuuuccucuuggcaucucagucaauccaaggcacuccagguggaaagccccacagcacugagccucacauaacagcagcucacccaauuuuucacaauucugacagacauucuccuugagugcagcuccuccaccgcguucacccugcauuuuuuuagaggcaggcaucccgggaucguguucuacaccuuccucaacagucuccuuggggcuuguggccguccugugaggcauuaguucucccucugagccuggaaucucuuuugacgagucaucauuuuucacuuuuuuacacugcaucuuggcugcagcaugccucugucguuuucgcuuccuuggcuugucaaauaucuugguagugccuccaccaaaaucuuuugaauaagauguggcacaagauucaguuaugccauucuccaggugaccagcuucauagcacuuuuuagaaaggccaaggucccccuucuugggcauaaauccagggucuaaaucauuggauucaagaaguuucuuaguugguuuucuuugacguuuacuuucauaauuuccuggcguuuuaacuagcaauuccucagacucaagggcaggccguggagagacuuccggagccacaggcacagacaaggucagcugcggcaacucagcauguccaccuccaaguucugacugagccaaggggcccuccaaaaacggagccucccuuucaagaacuggaggcucuucuuugguugaaaucaaagaauucucguccaccugcuuguucugagcacuagaucgaccucgggcuagaaggcuuuccucuucacagcgggaacuuaccuugugcaccugcuccuguaccuucuuuuguuuuuucuuaggagcaaauaucugaucauauucuucuguauauuccaaaagccacuugcuuggcuuccuaaggcguuucuucucugaccgcacagcugguucagggagcucagccuguggugucaaacugggaauuccuggcuccuuuuccaugucaccaaugcuggcacuggauuuaucacaaacauuuaaccguggcccagcugaaucuaagcagucagcaugauuuugcucugucagugguuccucaaguaugcuugcugaaggaguucuaugcucuggaaacucaucccgccccuccugcacagggucacuaggaaguaagacccuaaaggcacacucagaguuuucuuucucuuuaaaucuguucaugcgcuuacgagguuuagugcgccuuugguuuaaacgcugccaccgcuuuuuaggcaccacuugauuuacaccauugaguucaucauucucacuguucauuacagaguccagcucugggccuuuuccguuuucaaaagagaguccuuuuucagaaauuuuaccaggaucagauugcuuaaccuugcuaucgaaaugcacaucagaaaaauggucaccaucuucacuuguuaaguggcccauuaucugaaggggauccucuuuacuaggaucuucugccccaccucucaaugaaccuccacguucucggucucccugcaguacagcaucaagagucacacuuggaagcugauucaguuuucuuuugcgcucggucuuuaaggcuuuacgguucacuguguucuuuaccauuugggcugaaaaagcaucucgcaauuuggaugaaggcuuugaucguccacaguugcgccuaguaacacagucugaacgacuuuuaccagaagcagggaggucucucuugucggacaguaagccagguagggaagcagacaacucgccagauaaugcagagucacccccacuagggcuaggauuggcggaguucugagugccaucucccuuuuucucugaauuguguguggagccuccugaaaccaaaaccuuagagacuccuacaggacuauuaguagaacaguccccacgaccaggacuccgguaagagaccagguuuugagcagucaucaaccgcugcuccuucgucuuacuaucaugcauaucuuucaacaucauuagcaauguacugaauuuguagucugguucaauagguaugugauucugacuagaagcagaagagaaaaguaaugguuuugauggcuuugauguuccagagucacugacauccucaccuaaggaucuguaagagaguuccuucaacucggauaaaacauguuucaccacugcuguuucuaugucacuugaaucccugguuuucucaugcauauuguucaguaguuuuagaccauccacuuucccacuuuuagaaaugcuggccaaaggagagccuuugguaucagaagagcagcauuucaaacugcacuccucauuuauaacuggggguucugccauaacuggauuuucuuuguguuugcacuuuauacuucggaacuugggcuguuugcuuuucgaauguaauagagcuugauuugcugccccacccuuuauuaacgaguucucacuggauaugcuugaugacagguugaauuuuggagagagagcaucauuuguaaaaucugacugggguuugugaacaagaguagaugccuucagaucagagagauuaaccugagacgucucgguuccaggcucugcacucuuaguacaacccauuaaguggucuguaugugaguuacuaaugagaggcuucuguuuugcuuuuacccuaguguuuguggcagcaaaccuagaauacuuuaucuuuucauuuuucugcauagauaacauguucucuguucuaucgaaagcaucuggaauuucaaggacacuguuaucagacucugagcuguguucuaugggauccaggucacugcuuccaucaucagaagugguacagauacuaauggaaucacuucgcuuuuccucaucaccugcuccaauauagcagagcuucacuuuugaaccacacaccaggcuucguugggguuuauucuucucucgagaacacuuugagaucaaagcacccucaggcaagcccaauaaagagucaccauuugaagucucaaauucuuucuuugcaguguuuuuuccacaggaagaaaacagaaaacuuccuggggcaguguuggacccugugaggcuauuugcuauccuggaaaguucauuagaggccugcguaucagauauauccccagagauaaaguuuaggccaagguucucuggaaucuuuccccuccguucaucuuuaugugcuucaaauuguauguggcccuuuuucacacuaguccuuuuuggauuaucagagcucuuucuggcucgagauuuagcgcaaggcuuuuccuucucaucugcagaauguucagaaucaaaagccagugauuucaaacagccauuaagcaacaggucauguucugacucaggaucauuugugcagucuucaaauggcauaucuucuucacuguccaacuugauugaaccaggaauacauuuucgguucuuugaccccuugggaacaucauacuguucugcaaguccaacacuggcuucccauuuacucaaaauuuucugaggaaccuuaugccuauauccuuuuucuuucuguuucccucuucuccuaaggacagguagcucuucgaauugaugucugccuucaaacaugacgauugcuuuuccagccacccaggcucucucagaaggaucuccaaaagccuccacguaguacugccgauagggccuccgguuggaaacuuucauuuuugaauguguguuaaucaacggaucagaacaaauccugcagggccaccaugggcgucucuugaauuuugcccagaugagaucuccaacuucauacuucaguggcguagacuuuuucuuagguugacaaaauggcaauuccugugaaguagaugaugaugaaguuccagguaauucuagcauguuuccuaauguacugguacuggaaucuggaucauccugaaaagauaaauuuauugaguuuaauugcucuucuauuguaauguuugugucuccuagugaaaagggggcugggagaagggcugcuuuuucauugcugccguccacuucauuucuuugcuuauuuuucuguguuucagucugaggagcuaauggcaagaauggcgauuugacugcaccgugucuacucucuggugugcugucuuguucacuucccauggccacuuuuacaccauucucugauuuagucucauaauugcagguggcauuggucugaguuuccucaaagaucuccucuauacucucauccucugugacuggcuguucuggguccauuucagaaucuacaucugcaucguccacacaaguaaaauucucaaagugcagaaagccauucuugauagucuuuguuacuuuuaccuggaguucaggggaguuauuacaagaggguuccuguuucauagcaagugcuguaggaccaccaggacucaaggaagugcaaacaauuggcgucugagcucuugaaucacuuuuuucagggucuugaaaggauucugauccaucagcagacccauuuaaauacucuacauugaucauggaggccaaauccuguagucuccgcaguggaauguaacaagauggagaaucuuguccauaagcauuuugggauguuccacugacagucgauaacugcauaguacacccauuaaguggcucagaaaaauuggauugaccauuaccgaaagggcuguccuugucuucaggggcaucuaaauucacuggauuggaaaagggcagcagacaauuucuucuggguaguucacaggucugauccauccugggccggcaucaaccgugccccgcgcccccucccgggccagcuggggggagggggugacccucauuacacuggggugcgagcggagcgguggggagagagcggggccgcucgccgcaccccccuccccccgcguc

SEQ ID NO: 2027 - RNA, 8406 nt, Homo sapiens
uuagauagagucuuguuauguugcccuggcuggagugcagugguuauucacaggcaugaucacagcauacuucaggcuggaacuccugggcuugaauggucuuucugccuuagccuccugagcagcugggacuauaggugcaugacgccgcaccuggccauaacacuccuucucagcucauuuuugagucaugaaaaaugcucuuucaagaaucaccaggccuaugauaagucccauggaacaaaccuaucacuguguaagagcugagcaggagaaaaccaucucuccucauacaccucauuuguucauucaauaaaaauucaugacacaccacuauggacaucaggaaguagagaugaauaaggcugggucucugcccuaagugauuagccuggaaagccauacuggacacaguguccauacuggccuccuugucuccuuuccugccccucccugcacuccuuuacauaacagccagaacaguucucucaaacauaaagcagauccccagcuuaaacccuuuaaagaccuucaugaggcccuaugugacaggagaagcaggagaaggugguggaugagaagaugaggcuguacugaguucagggcaccugaacucaagggagacuuucacagggugcucgacucugucccaacuccuaaagugacuacuggggacuacugaggucugaauggggugggggugaggggucaagacagacauacuagauccaauggcaauauggcucaaaacccuaggucuguuaaguuguagucuggcccaugagggaaauucuuuauuuggaugcuucagugaccaagagacagagcauuaggcacacacagaagcacacacauacacacaaacacacacacacacacacacacauccacacacaauaugcaaagcaaaggcauuucacaggugaagggauagggagugggggaaggaggccacgagagcagcuaggggcuucuuugacacaaugaagagaagccucugauggugacacuccuuggaauucucgucucaagguuacaaggaaaaaucuauccguguggacucagucccaggccauaaaacacagcaaagauagagaaaucuggguguggggccugggaaacgccuguuccucacuguagaaaccugcaucagcucucucuuucuuucccugggacccagaaaucacccgguggaugauggggaaggcuagcaccacagcaaacugggcaagugguccgcugcacaagggggaagagagggcuaguagggccgaggguagcaaugaaccucacagcuagcgggcaugaggcagucugccuuuaggggcagaacccucagggagacuugcauguggggcacuuucccguguaaccuagggucagagcaccucugauggaggaggggaaaggucccauccccauuggaguguccuaugaucucaguggacauggaggccgcccccagccccagcucguugccaacugcugcagauccuuagcaccauucaggaacuguggagggggcagcggggguagcaaugcuccgccaagauugugucacugcuccaggaggauacuucacaguuggcagaaaccugcgcaacuggccauaucuggucuaagacucaggaaagccugcaccuucugggggaaggcagagugucguauuagcuccaagcucccauguugcagccauuuccucuguuuccugcccugccccagguuuggcaugaaaguuccagguuuugcuggaaaugucuagggcccagagagaucucugcucuuuaguugcaagaacuggcccaaaacugaccuuuagaggaaagacagguggcaggggccucagcaccuaaggcccagagggguugggaaauggggaaagccacccuccaaacuaccaccccgcgagaccccgagucucucaauacccuugccuccccugucaugaccuacaggaccccugccaaaggggagcagcaggagugaauuagcccggaccaaugagaggcugucuguggcccaauccugccucaggcccguguacuuuccuggugagaacaacgagcaagagggagccaagggcugagcagucacgggaagcuggcucauggcuggcccaauaugggaugcugggcagaaucaccucuagucuuccaaggugguugagucuuucugaauggguugccuuugcauuggaaucuggcccagggaugaugccacuguuuuuggugacugguucuuguguuugaagccgcugacaugagcuugguacuguucuauggaguucagcacuaucuuacauguuuugcagggguagcccuuuccagcuggaaagucagugacagcaggguccgccagccgcccauagcgugccauuaguuugagcuuggucuccuguuuucuguguuucuugcccacauaauguuguugagccaugacagggucguugaaaguugcauggcagaggcugcagaacuugucugggucuaucaucucucuauucuggugcaaggcuuccaccuuaguggacugcugcuucagcuuuaaguucuuugcgugggucuuccccagguagugcgacugggccacgacaggggaggaaaaggucauguuacagauggggcagcacugguucuugucuuugcuucugcugcucugguaaugugccagcuucugggacucagaaauaagcaaggcgcagcaaaccuuacacuggguguuggugaagagacauugguucuucuggaucaugugcuccacuuuuuuauaugucccauccacuccuuugcccaucuuauccuugcugcucacgucacccuccauguaagggaagacucgggccuggugaguccacaaauagucauuagauccaaaaaagaggacugggaacucucccacaucaugucucaucuuaucaauguuggaaggaacagcucgaggauggcagaucucagcuggccaccaccuguaucguccaacuuuuacccagacaaucucccuguaguguggcuuuuugccugcuuuacagucauugcaauaccaguuuccuucagggauaucaauguucaggcauucacgaugaaaagcagcagggcaagaaucacagcacagaaggcugccuccuucugagcacacaaagcaccagcuaacauuaacaugcucaugauuucggcagccccgccuagggguaaagugauuagggcagaugauacuauuagaugcaaggaucuuugacccagcagccaggcaaaagucauuggcgugguaugccacaggacagcggacacagcgcaucaaccgaccuuuagaugcagaaacauuggcuggauuagcagcaugacagguuauacagauguggagggagcaccggaagcccuuguucugcauaacaguggguggguacuucuggacacacucuucaugguaaaacuuuccacacaaggguagaaggcaccuuuuaacaucuuccccacucugcuuacauacaaaacagguauggauuccugugcgacauucauugcagauaaauuuuccucuuggcaucucagucaauccaaggcacuccagguggaaagccccacagcacugagccucacauaacagcagcucacccaauuuuucacaauucugacagacauucuccuugagugcagcuccuccaccgcguucacccugcauuuuuuuagaggcaggcaucccgggaucguguucuacaccuuccucaacagucuccuuggggcuuguggccguccugugaggcauuaguucucccucugagccuggaaucucuuuugacgagucaucauuuuucacuuuuuuacacugcaucuuggcugcagcaugccucugucguuuucgcuuccuuggcuugucaaauaucuugguagugccuccaccaaaaucuuuugaauaagauguggcacaagauucaguuaugccauucuccaggugaccagcuucauagcacuuuuuagaaaggccaaggucccccuucuugggcauaaauccagggucuaaaucauuggauucaagaaguuucuuaguugguuuucuuugacguuuacuuucauaauuuccuggcguuuuaacuagcaauuccucagacucaagggcaggccguggagagacuuccggagccacaggcacagacaaggucagcugcggcaacucagcauguccaccuccaaguucugacugagccaaggggcccuccaaaaacggagccucccuuucaagaacuggaggcucuucuuugguugaaaucaaagaauucucguccaccugcuuguucugagcacuagaucgaccucgggcuagaaggcuuuccucuucacagcgggaacuuaccuugugcaccugcuccuguaccuucuuuuguuuuuucuuaggagcaaauaucugaucauauucuucuguauauuccaaaagccacuugcuuggcuuccuaaggcguuucuucucugaccgcacagcugguucagggagcucagccuguggugucaaacugggaauuccuggcuccuuuuccaugucaccaaugcuggcacuggauuuaucacaaacauuuaaccguggcccagcugaaucuaagcagucagcaugauuuugcucugucagugguuccucaaguaugcuugcugaaggaguucuaugcucuggaaacucaucccgccccuccugcacagggucacuaggaaguaagacccuaaaggcacacucagaguuuucuuucucuuuaaaucuguucaugcgcuuacgagguuuagugcgccuuugguuuaaacgcugccaccgcuuuuuaggcaccacuugauuuacaccauugaguucaucauucucacuguucauuacagaguccagcucugggccuuuuccguuuucaaaagagaguccuuuuucagaaauuuuaccaggaucagauugcuuaaccuugcuaucgaaaugcacaucagaaaaauggucaccaucuucacuuguuaaguggcccauuaucugaaggggauccucuuuacuaggaucuucugccccaccucucaaugaaccuccacguucucggucucccugcaguacagcaucaagagucacacuuggaagcugauucaguuuucuuuugcgcucggucuuuaaggcuuuacgguucacuguguucuuuaccauuugggcugaaaaagcaucucgcaauuuggaugaaggcuuugaucguccacaguugcgccuaguaacacagucugaacgacuuuuaccagaagcagggaggucucucuugucggacaguaagccagguagggaagcagacaacucgccagauaaugcagagucacccccacuagggcuaggauuggcggaguucugagugccaucucccuuuuucucugaauuguguguggagccuccugaaaccaaaaccuuagagacuccuacaggacuauuaguagaacaguccccacgaccaggacuccgguaagagaccagguuuugagcagucaucaaccgcugcuccuucgucuuacuaucaugcauaucuuucaacaucauuagcaauguacugaauuuguagucugguucaauagguaugugauucugacuagaagcagaagagaaaaguaaugguuuugauggcuuugauguuccagagucacugacauccucaccuaaggaucuguaagagaguuccuucaacucggauaaaacauguuucaccacugcuguuucuaugucacuugaaucccugguuuucucaugcauauuguucaguaguuuuagaccauccacuuucccacuuuuagaaaugcuggccaaaggagagccuuugguaucagaagagcagcauuucaaacugcacuccucauuuauaacuggggguucugccauaacuggauuuucuuuguguuugcacuuuauacuucggaacuugggcuguuugcuuuucgaauguaauagagcuugauuugcugccccacccuuuauuaacgaguucucacuggauaugcuugaugacagguugaauuuuggagagagagcaucauuuguaaaaucugacugggguuugugaacaagaguagaugccuucagaucagagagauuaaccugagacgucucgguuccaggcucugcacucuuaguacaacccauuaaguggucuguaugugaguuacuaaugagaggcuucuguuuugcuuuuacccuaguguuuguggcagcaaaccuagaauacuuuaucuuuucauuuuucugcauagauaacauguucucuguucuaucgaaagcaucuggaauuucaaggacacuguuaucagacucugagcuguguucuaugggauccaggucacugcuuccaucaucagaagugguacagauacuaauggaaucacuucgcuuuuccucaucaccugcuccaauauagcagagcuucacuuuugaaccacacaccaggcuucguugggguuuauucuucucucgagaacacuuugagaucaaagcacccucaggcaagcccaauaaagagucaccauuugaagucucaaauucuuucuuugcaguguuuuuuccacaggaagaaaacagaaaacuuccuggggcaguguuggacccugugaggcuauuugcuauccuggaaaguucauuagaggccugcguaucagauauauccccagagauaaaguuuaggccaagguucucuggaaucuuuccccuccguucaucuuuaugugcuucaaauuguauguggcccuuuuucacacuaguccuuuuuggauuaucagagcucuuucuggcucgagauuuagcgcaaggcuuuuccuucucaucugcagaauguucagaaucaaaagccagugauuucaaacagccauuaagcaacaggucauguucugacucaggaucauuugugcagucuucaaauggcauaucuucuucacuguccaacuugauugaaccaggaauacauuuucgguucuuugaccccuugggaacaucauacuguucugcaaguccaacacuggcuucccauuuacucaaaauuuucugaggaaccuuaugccuauauccuuuuucuuucuguuucccucuucuccuaaggacagguagcucuucgaauugaugucugccuucaaacaugacgauugcuuuuccagccacccaggcucucucagaaggaucuccaaaagccuccacguaguacugccgauagggccuccgguuggaaacuuucauuuuugaauguguguuaaucaacggaucagaacaaauccugcagggccaccaugggcgucucuugaauuuugcccagaugagaucuccaacuucauacuucaguggcguagacuuuuucuuagguugacaaaauggcaauuccugugaaguagaugaugaugaaguuccagguaauucuagcauguuuccuaauguacugguacuggaaucuggaucauccugaaaagauaaauuuauugaguuuaauugcucuucuauuguaauguuugugucuccuagugaaaagggggcugggagaagggcugcuuuuucauugcugccguccacuucauuucuuugcuuauuuuucuguguuucagucugaggagcuaauggcaagaauggcgauuugacugcaccgugucuacucucuggugugcugucuuguucacuucccauggccacuuuuacaccauucucugauuuagucucauaauugcagguggcauuggucugaguuuccucaaagaucuccucuauacucucauccucugugacuggcuguucuggguccauuucagaaucuacaucugcaucguccacacaaguaaaauucucaaagugcagaaagccauucuugauagucuuuguuacuuuuaccuggaguucaggggaguuauuacaagaggguuccuguuucauagcaagugcuguaggaccaccaggacucaaggaagugcaaacaauuggcgucugagcucuugaaucacuuuuuucagggucuugaaaggauucugauccaucagcagacccauuuaaauacucuacauugaucauggaggccaaauccuguagucuccgcaguggaauguaacaagauggagaaucuuguccauaagcauuuugggauguuccacugacagucgauaacugcauaguacacccauuaaguggcucagaaaaauuggauugaccauuaccgaaagggcuguccuugucuucaggggcaucuaaauucacuggauuggaaaagggcagcagacaauuucuucuggguaguucacaggucugauccauccugggccggcaucaaccgugccccgcgcccccucccgggccagcuggggggagggggugacccucauuacacuggggugcgagcggagcgguggggagagagcggggccgcucgccgcaccccccuccccccgcguc

SEQ ID NO: 2028 - RNA, 6638 nt, Homo sapiens
aaacaaguuuuauuuugagaacauuuuaaaauacagaaaaaguacacagggucauaccauacccagcugcucagaauugacaauuguucauuaccauuucuuuuuuuuaaguugaaacagggucucauuauguugcccaggcuggucuugaacuccugggcucaagcaaucugccugucucggccuccaaaagugcugggaguacaggcuugagccaccgcaccuggccuauuuuaucauucuuuuccaacccuuuucuaccuuggcuucuccacaggcuccagggaggucuagcuuggcuggucaaaacggaggugacauugacagaaagugagugauuaaagguugggugucagagucggacagaucuggguuuuuuuuggagacagagucuuacucugucgcucaggcuggaaugcaguggcacgaucuaggcucacugcaaccaccaccuccuggguucaagugauucuccugccucagccaccugaguagcugggauuacgggugugugccaccacgcccagcuaauuuuuguauuuuugguagagacgggguuuugccauuguuggccaggcuugaacuccuggccacaggagaucugcuggccucagucucccaaagggcugggauuauaggugugagccaccuugcccagugacagaucuggguuugagucccgaaaacucuuuguggucacggacaaaucacuuaaccucaagccucaguuucaucuucugugaaaugggaauaauacaucuuccgugaggacucaguaugaugauguaugucaagcacaaugccagugccuggcauauaccccuugcucacugaagaguagccaauaugaauauuugcagcuaugggccugggacccacccaaaagcaugggcaacacccuccugugaccgaaagggagggacugugagaaugaccccuccucagccuucauuucuccucauuucccacccguccucaauucuggguacaucugucuccaguuuauacucugaagacagcagggcugugaguuacagguugcccagggcauuuuuguggaggcagagaguuuagagcugaugacagccugggagagcucuggggaggcuuccaaaccaaaguggauggaggggaacuggggaggagggaucugagugagguuagucccggcuaaccucacucaguucuaacuacccugggcugguccuggggcuucucacagccucaguagcaccccccguccccuuauucacuggucucggauacucuagaccuguggccuggcuugcuaggacaggggcuuucaggcuuugccagacucagccucucuagacuugggccuacaagccucacacccaccggguguuggcaugcacgucuguuuggaggaggaccgacagcugggaaguggcagaggcugggcuggaagggugagaggguugguggucuccagggaagcgggaaguaaacucgugcccuucuguacuuugcccggugcccuggaccauggaggguuucguuggggugugaauaacagaaaccuaagugagcagggccuaaaugaaacaguguauccaucucucacuuagccccacguccagagguggguguagguuggucugaagucaggguugaggacucguccguucuccagguuuuucucucauggucgcaagauguuggcuucagcugcugccgucacauuugugcagaggcaggaggaaggaagaaguuccagagaguugaguuuccacacagcaacucccaauuucauuuccuuggccagacugugacacggccaccccuagcucuagucuuccaaggugguugagucuuucugaauggguugccuuugcauuggaaucuggcccagggaugaugccacuguuuuuggugacugguucuuguguuugaagccgcugacaugagcuugguacuguucuauggaguucagcacuaucuuacauguuuugcagggguagcccuuuccagcuggaaagucagugacagcaggguccgccagccgcccauagcgugccauuaguuugagcuuggucuccuguuuucuguguuucuugcccacauaauguuguugagccaugacagggucguugaaaguugcauggcagaggcugcagaacuugucugggucuaucaucucucuauucuggugcaaggcuuccaccuuaguggacugcugcuucagcuuuaaguucuuugcgugggucuuccccagguagugcgacugggccacgacaggggaggaaaaggucauguuacagauggggcagcacugguucuugucuuugcuucugcugcucuucugaucugagucuagcuucuucguuucccccuuuaaugucuccauuccauggauugcuagguaucucuucacuuuguuggcauguuuuuugcucugguaaugugccagcuucugggacucagaaauaagcaaggcgcagcaaaccuuacacuggguguuggugaagagacauugguucuucuggaucaugugcuccacugugcgacauucauugcagauaaauuuuccucuuggcaucucagucaauccaaggcacuccagguggaaagccccacagcacugagccucacauaacagcagcucacccaauuuuucacaauucugacagacauucuccuugagugcagcuccuccaccgcguucacccugcauuuuuuuagaggcaggcaucccgggaucguguucuacaccuuccucaacagucuccuuggggcuuguggccguccugugaggcauuaguucucccucugagccuggaaucucuuuugacgagucaucauuuuucacuuuuuuacacugcaucuuggcugcagcaugccucugucguuuucgcuuccuuggcuugucaaauaucuugguagugccuccaccaaaaucuuuugaauaagauguggcacaagauucaguuaugccauucuccaggugaccagcuucauagcacuuuuuagaaaggccaaggucccccuucuugggcauaaauccagggucuaaaucauuggauucaagaaguuucuuaguugguuuucuuugacguuuacuuucauaauuuccuggcguuuuaacuagcaauuccucagacucaagggcaggccguggagagacuuccggagccacaggcacagacaaggucagcugcggcaacucagcauguccaccuccaaguucugacugagccaaggggcccuccaaaaacggagccucccuuucaagaacuggaggcucuucuuugguugaaaucaaagaauucucguccaccugcuuguucugagcacuagaucgaccucgggcuagaaggcuuuccucuucacagcgggaacuuaccuugugcaccugcuccuguaccuucuuuuguuuuuucuuaggagcaaauaucugaucauauucuucuguauauuccaaaagccacuugcuuggcuuccuaaggcguuucuucucugaccgcacagcugguucagggagcucagccuguggugucaaacugggaauuccuggcuccuuuuccaugucaccaaugcuggcacuggauuuaucacaaacauuuaaccguggcccagcugaaucuaagcagucagcaugauuuugcucugucagugguuccucaaguaugcuugcugaaggaguucuaugcucuggaaacucaucccgccccuccugcacagggucacuaggaaguaagacccuaaaggcacacucagaguuuucuuucucuuuaaaucuguucaugcgcuuacgagguuuagugcgccuuugguuuaaacgcugccaccgcuuuuuaggcaccacuugauuuacaccauugaguucaucauucucacuguucauuacagaguccagcucugggccuuuuccguuuucaaaagagaguccuuuuucagaaauuuuaccaggaucagauugcuuaaccuugcuaucgaaaugcacaucagaaaaauggucaccaucuucacuuguuaaguggcccauuaucugaaggggauccucuuuacuaggaucuucugccccaccucucaaugaaccuccacguucucggucucccugcaguacagcaucaagagucacacuuggaagcugauucaguuuucuuuugcgcucggucuuuaaggcuuuacgguucacuguguucuuuaccauuugggcugaaaaagcaucucgcaauuuggaugaaggcuuugaucguccacaguugcgccuaguaacacagucugaacgacuuuuaccagaagcagggaggucucucuugucggacaguaagccagguagggaagcagacaacucgccagauaaugcagagucacccccacuagggcuaggauuggcggaguucugagugccaucucccuuuuucucugaauuguguguggagccuccugaaaccaaaaccuuagagacuccuacaggacuauuaguagaacaguccccacgaccaggacuccgguaagagaccagguuuugagcagucaucaaccgcugcuccuucgucuuacuaucaugcauaucuuucaacaucauuagcaauguacugaauuuguagucugguucaauagguaugugauucugacuagaagcagaagagaaaaguaaugguuuugauggcuuugauguuccagagucacugacauccucaccuaaggaucuguaagagaguuccuucaacucggauaaaacauguuucaccacugcuguuucuaugucacuugaaucccugguuuucucaugcauauuguucaguaguuuuagaccauccacuuucccacuuuuagaaaugcuggccaaaggagagccuuugguaucagaagagcagcauuucaaacugcacuccucauuuauaacuggggguucugccauaacuggauuuucuuuguguuugcacuuuauacuucggaacuugggcuguuugcuuuucgaauguaauagagcuugauuugcugccccacccuuuauuaacgaguucucacuggauaugcuugaugacagguugaauuuuggagagagagcaucauuuguaaaaucugacugggguuugugaacaagaguagaugccuucagaucagagagauuaaccugagacgucucgguuccaggcucugcacucuuaguacaacccauuaaguggucuguaugugaguuacuaaugagaggcuucuguuuugcuuuuacccuaguguuuguggcagcaaaccuagaauacuuuaucuuuucauuuuucugcauagauaacauguucucuguucuaucgaaagcaucuggaauuucaaggacacuguuaucagacucugagcuguguucuaugggauccaggucacugcuuccaucaucagaagugguacagauacuaauggaaucacuucgcuuuuccucaucaccugcuccaauauagcagagcuucacuuuugaaccacacaccaggcuucguugggguuuauucuucucucgagaacacuuugagaucaaagcacccucaggcaagcccaauaaagagucaccauuugaagucucaaauucuuucuuugcaguguuuuuuccacaggaagaaaacagaaaacuuccuggggcaguguuggacccugugaggcuauuugcuauccuggaaaguucauuagaggccugcguaucagauauauccccagagauaaaguuuaggccaagguucucuggaaucuuuccccuccguucaucuuuaugugcuucaaauuguauguggcccuuuuucacacuaguccuuuuuggauuaucagagcucuuucuggcucgagauuuagcgcaaggcuuuuccuucucaucugcagaauguucagaaucaaaagccagugauuucaaacagccauuaagcaacaggucauguucugacucaggaucauuugugcagucuucaaauggcauaucuucuucacuguccaacuugauugaaccaggaauacauuuucgguucuuugaccccuugggaacaucauacuguucugcaaguccaacacuggcuucccauuuacucaaaauuuucugaggaaccuuaugccuauauccuuuuucuuucuguuucccucuucuccuaaggacagguagcucuucgaauugaugucugccuucaaacaugacgauugcuuuuccagccacccaggcucucucagaaggaucuccaaaagccuccacguaguacugccgauagggccuccgguuggaaacuuucauuuuugaauguguguuaaucaacggaucagaacaaauccugcagggccaccaugggcgucucuugaauuuugcccagaugagaucuccaacuucauacuucaguggcguagacuuuuucuuagguugacaaaauggcaauuccugugaaguagaugaugaugaaguuccagguaauucuagcauguuuccuaauguacugguacuggaaucuggaucauccgaaagggcuguccuugucuucaggggcaucuaaauucacuggauuggaaaagggcagcagacaauuucuucuggguaguucacaggucugauccauccugggccggcaucaaccugggggcuugggcuggggucuucgaggccucaggccccgagcagacgcggccgcaggcgaacccccuacccggcc

SEQ ID NO: 2029 - RNA, 7621 nt, Homo sapiens
uuagauagagucuuguuauguugcccuggcuggagugcagugguuauucacaggcaugaucacagcauacuucaggcuggaacuccugggcuugaauggucuuucugccuuagccuccugagcagcugggacuauaggugcaugacgccgcaccuggccauaacacuccuucucagcucauuuuugagucaugaaaaaugcucuuucaagaaucaccaggccuaugauaagucccauggaacaaaccuaucacuguguaagagcugagcaggagaaaaccaucucuccucauacaccucauuuguucauucaauaaaaauucaugacacaccacuauggacaucaggaaguagagaugaauaaggcugggucucugcccuaagugauuagccuggaaagccauacuggacacaguguccauacuggccuccuugucuccuuuccugccccucccugcacuccuuuacauaacagccagaacaguucucucaaacauaaagcagauccccagcuuaaacccuuuaaagaccuucaugaggcccuaugugacaggagaagcaggagaaggugguggaugagaagaugaggcuguacugaguucagggcaccugaacucaagggagacuuucacagggugcucgacucugucccaacuccuaaagugacuacuggggacuacugaggucugaauggggugggggugaggggucaagacagacauacuagauccaauggcaauauggcucaaaacccuaggucuguuaaguuguagucuggcccaugagggaaauucuuuauuuggaugcuucagugaccaagagacagagcauuaggcacacacagaagcacacacauacacacaaacacacacacacacacacacacauccacacacaauaugcaaagcaaaggcauuucacaggugaagggauagggagugggggaaggaggccacgagagcagcuaggggcuucuuugacacaaugaagagaagccucugauggugacacuccuuggaauucucgucucaagguuacaaggaaaaaucuauccguguggacucagucccaggccauaaaacacagcaaagauagagaaaucuggguguggggccugggaaacgccuguuccucacuguagaaaccugcaucagcucucucuuucuuucccugggacccagaaaucacccgguggaugauggggaaggcuagcaccacagcaaacugggcaagugguccgcugcacaagggggaagagagggcuaguagggccgaggguagcaaugaaccucacagcuagcgggcaugaggcagucugccuuuaggggcagaacccucagggagacuugcauguggggcacuuucccguguaaccuagggucagagcaccucugauggaggaggggaaaggucccauccccauuggaguguccuaugaucucaguggacauggaggccgcccccagccccagcucguugccaacugcugcagauccuuagcaccauucaggaacuguggagggggcagcggggguagcaaugcuccgccaagauugugucacugcuccaggaggauacuucacaguuggcagaaaccugcgcaacuggccauaucuggucuaagacucaggaaagccugcaccuucugggggaaggcagagugucguauuagcuccaagcucccauguugcagccauuuccucuguuuccugcccugccccagguuuggcaugaaaguuccagguuuugcuggaaaugucuagggcccagagagaucucugcucuuuaguugcaagaacuggcccaaaacugaccuuuagaggaaagacagguggcaggggccucagcaccuaaggcccagagggguugggaaauggggaaagccacccuccaaacuaccaccccgcgagaccccgagucucucaauacccuugccuccccugucaugaccuacaggaccccugccaaaggggagcagcaggagugaauuagcccggaccaaugagaggcugucuguggcccaauccugccucaggcccguguacuuuccuggugagaacaacgagcaagagggagccaagggcugagcagucacgggaagcuggcucauggcuggcccaauaugggaugcugggcagaaucaccucuagucuuccaaggugguugagucuuucugaauggguugccuuugcauuggaaucuggcccagggaugaugccacuguuuuuggugacugguucuuguguuugaagccgcugacaugagcuugguacuguucuauggaguucagcacuaucuuacauguuuugcagggguagcccuuuccagcuggaaagucagugacagcaggguccgccagccgcccauagcgugccauuaguuugagcuuggucuccuguuuucuguguuucuugcccacauaauguuguugagccaugacagggucguugaaaguugcauggcagaggcugcagaacuugucugggucuaucaucucucuauucuggugcaaggcuuccaccuuaguggacugcugcuucagcuuuaaguucuuugcgugggucuuccccagguagugcgacugggccacgacaggggaggaaaaggucauguuacagauggggcagcacugguucuugucuuugcuucugcugcucugguaaugugccagcuucugggacucagaaauaagcaaggcgcagcaaaccuuacacuggguguuggugaagagacauugguucuucuggaucaugugcuccacuuuuuuauaugucccauccacuccuuugcccaucuuauccuugcugcucacgucacccuccauguaagggaagacucgggccuggugaguccacaaauagucauuagauccaaaaaagaggacugggaacucucccacaucaugucucaucuuaucaauguuggaaggaacagcucgaggauggcagaucucagcuggccaccaccuguaucguccaacuuuuacccagacaaucucccuguaguguggcuuuuugccugcuuuacagucauugcaauaccaguuuccuucagggauaucaauguucaggcauucacgaugaaaagcagcagggcaagaaucacagcacagaaggcugccuccuucugagcacacaaagcaccagcuaacauuaacaugcucaugauuucggcagccccgccuagggguaaagugauuagggcagaugauacuauuagaugcaaggaucuuugacccagcagccaggcaaaagucauuggcgugguaugccacaggacagcggacacagcgcaucaaccgaccuuuagaugcagaaacauuggcuggauuagcagcaugacagguuauacagauguggagggagcaccggaagcccuuguucugcauaacaguggguggguacuucuggacacacucuucaugguaaaacuuuccacacaaggguagaaggcaccuuuuaacaucuuccccacucugcuuacauacaaaacagguauggauuccugugcgacauucauugcagauaaauuuuccucuuggcaucucagucaauccaaggcacuccagguggaaagccccacagcacugagccucacauaacagcagcucacccaauuuuucacaauucugacagacauucuccuugagugcagcuccuccaccgcguucacccugcauuuuuuuagaggcaggcaucccgggaucguguucuacaccuuccucaacagucuccuuggggcuuguggccguccugugaggcauuaguucucccucugagccuggaaucucuuuugacgagucaucauuuuucacuuuuuuacacugcaucuuggcugcagcaugccucugucguuuucgcuuccuuggcuugucaaauaucuugguagugccuccaccaaaaucuuuugaauaagauguggcacaagauucaguuaugccauucuccaggugaccagcuucauagcacuuuuuagaaaggccaaggucccccuucuugggcauaaauccagggucuaaaucauuggauucaagaaguuucuuaguugguuuucuuugacguuuacuuucauaauuuccuggcguuuuaacuagcaauuccucagacucaagggcaggccguggagagacuuccggagccacaggcacagacaaggucagcugcggcaacucagcauguccaccuccaaguucugacugagccaaggggcccuccaaaaacggagccucccuuucaagaacuggaggcucuucuuugguugaaaucaaagaauucucguccaccugcuuguucugagcacuagaucgaccucgggcuagaaggcuuuccucuucacagcgggaacuuaccuugugcaccugcuccuguaccuucuuuuguuuuuucuuaggagcaaauaucugaucauauucuucuguauauuccaaaagccacuugcuuggcuuccuaaggcguuucuucucugaccgcacagcugguucagggagcucagccuguggugucaaacugggaauuccuggcuccuuuuccaugucaccaaugcuggcacuggauuuaucacaaacauuuaaccguggcccagcugaaucuaagcagucagcaugauuuugcucugucagugguuccucaaguaugcuugcugaaggaguucuaugcucuggaaacucaucccgccccuccugcacagggucacuaggaaguaagacccuaaaggcacacucagaguuuucuuucucuuuaaaucuguucaugcgcuuacgagguuuagugcgccuuugguuuaaacgcugccaccgcuuuuuaggcaccacuugauuuacaccauugaguucaucauucucacuguucauuacagaguccagcucugggccuuuuccguuuucaaaagagaguccuuuuucagaaauuuuaccaggaucagauugcuuaaccuugcuaucgaaaugcacaucagaaaaauggucaccaucuucacuuguuaaguggcccauuaucugaaggggauccucuuuacuaggaucuucugccccaccucucaaugaaccuccacguucucggucucccugcaguacagcaucaagagucacacuuggaagcugauucaguuuucuuuugcgcucggucuuuaaggcuuuacgguucacuguguucuuuaccauuugggcugaaaaagcaucucgcaauuuggaugaaggcuuugaucguccacaguugcgccuaguaacacagucugaacgacuuuuaccagaagcagggaggucucucuugucggacaguaagccagguagggaagcagacaacucgccagauaaugcagagucacccccacuagggcuaggauuggcggaguucugagugccaucucccuuuuucucugaauuguguguggagccuccugaaaccaaaaccuuagagacuccuacaggacuauuaguagaacaguccccacgaccaggacuccgguaagagaccagguuuugagcagucaucaaccgcugcuccuucgucuuacuaucaugcauaucuuucaacaucauuagcaauguacugaauuuguagucugguucaauagguaugugauucugacuagaagcagaagagaaaaguaaugguuuugauggcuuugauguuccagagucacugacauccucaccuaaggaucuguaagagaguuccuucaacucggauaaaacauguuucaccacugcuguuucuaugucacuugaaucccugguuuucucaugcauauuguucaguaguuuuagaccauccacuuucccacuuuuagaaaugcuggccaaaggagagccuuugguaucagaagagcagcauuucaaacugcacuccucauuuauaacuggggguucugccauaacuggauuuucuuuguguuugcacuuuauacuucggaacuugggcuguuugcuuuucgaauguaauagagcuugauuugcugccccacccuuuauuaacgaguucucacuggauaugcuugaugacagguugaauuuuggagagagagcaucauuuguaaaaucugacugggguuugugaacaagaguagaugccuucagaucagagagauuaaccugagacgucucgguuccaggcucugcacucuuaguacaacccauuaaguggucuguaugugaguuacuaaugagaggcuucuguuuugcuuuuacccuaguguuuguggcagcaaaccuagaauacuuuaucuuuucauuuuucugcauagauaacauguucucuguucuaucgaaagcaucuggaauuucaaggacacuguuaucagacucugagcuguguucuaugggauccaggucacugcuuccaucaucagaagugguacagauacuaauggaaucacuucgcuuuuccucaucaccugcuccaauauagcagagcuucacuuuugaaccacacaccaggcuucguugggguuuauucuucucucgagaacacuuugagaucaaagcacccucaggcaagcccaauaaagagucaccauuugaagucucaaauucuuucuuugcaguguuuuuuccacaggaagaaaacagaaaacuuccuggggcaguguuggacccugugaggcuauuugcuauccuggaaaguucauuagaggccugcguaucagauauauccccagagauaaaguuuaggccaagguucucuggaaucuuuccccuccguucaucuuuaugugcuucaaauuguauguggcccuuuuucacacuaguccuuuuuggauuaucagagcucuuucuggcucgagauuuagcgcaaggcuuuuccuucucaucugcagaauguucagaaucaaaagccagugauuucaaacagccauuaagcaacaggucauguucugacucaggaucauuugugcagucuucaaauggcauaucuucuucacuguccaacuugauugaaccaggaauacauuuucgguucuuugaccccuugggaacaucauacuguucugcaaguccaacacuggcuucccauuuacucaaaauuuucugaggaaccuuaugccuauauccuuuuucuuucuguuucccucuucuccuaaggacagguagcucuucgaauugaugucugccuucaaacaugacgauugcuuuuccagccacccaggcucucucagaaggaucuccaaaagccuccacguaguacugccgauagggccuccgguuggaaacuuucauuuuugaauguguguuaaucaacggaucagaacaaauccugcagggccaccaugggcgucucuugaauuuugcccagaugagaucuccaacuucauacuucaguggcguagacuuuuucuuagguugacaaaauggcaauuccugugaaguagaugaugaugaaguuccagguaauucuagcauguuuccuaauguacugguacuggaaucuggaucauccgaaagggcuguccuugucuucaggggcaucuaaauucacuggauuggaaaagggcagcagacaauuucuucuggguaguucacaggucugauccauccugggccggcaucaaccugggggcuugggcuggggucuucgaggccucaggccccgagcagacgcggccgcaggcgaacccccuacccggcc

SEQ ID NO: 2030 - RNA, 6024 nt, Homo sapiens
aaacaaguuuuauuuugagaacauuuuaaaauacagaaaaaguacacagggucauaccauacccagcugcucagaauugacaauuguucauuaccauuucuuuuuuuuaaguugaaacagggucucauuauguugcccaggcuggucuugaacuccugggcucaagcaaucugccugucucggccuccaaaagugcugggaguacaggcuugagccaccgcaccuggccuauuuuaucauucuuuuccaacccuuuucuaccuuggcuucuccacaggcuccagggaggucuagcuuggcuggucaaaacggaggugacauugacagaaagugagugauuaaagguugggugucagagucggacagaucuggguuuuuuuuggagacagagucuuacucugucgcucaggcuggaaugcaguggcacgaucuaggcucacugcaaccaccaccuccuggguucaagugauucuccugccucagccaccugaguagcugggauuacgggugugugccaccacgcccagcuaauuuuuguauuuuugguagagacgggguuuugccauuguuggccaggcuugaacuccuggccacaggagaucugcuggccucagucucccaaagggcugggauuauaggugugagccaccuugcccagugacagaucuggguuugagucccgaaaacucuuuguggucacggacaaaucacuuaaccucaagccucaguuucaucuucugugaaaugggaauaauacaucuuccgugaggacucaguaugaugauguaugucaagcacaaugccagugccuggcauauaccccuugcucacugaagaguagccaauaugaauauuugcagcuaugggccugggacccacccaaaagcaugggcaacacccuccugugaccgaaagggagggacugugagaaugaccccuccucagccuucauuucuccucauuucccacccguccucaauucuggguacaucugucuccaguuuauacucugaagacagcagggcugugaguuacagguugcccagggcauuuuuguggaggcagagaguuuagagcugaugacagccugggagagcucuggggaggcuuccaaaccaaaguggauggaggggaacuggggaggagggaucugagugagguuagucccggcuaaccucacucaguucuaacuacccugggcugguccuggggcuucucacagccucaguagcaccccccguccccuuauucacuggucucggauacucuagaccuguggccuggcuugcuaggacaggggcuuucaggcuuugccagacucagccucucuagacuugggccuacaagccucacacccaccggguguuggcaugcacgucuguuuggaggaggaccgacagcugggaaguggcagaggcugggcuggaagggugagaggguugguggucuccagggaagcgggaaguaaacucgugcccuucuguacuuugcccggugcccuggaccauggaggguuucguuggggugugaauaacagaaaccuaagugagcagggccuaaaugaaacaguguauccaucucucacuuagccccacguccagagguggguguagguuggucugaagucaggguugaggacucguccguucuccagguuuuucucucauggucgcaagauguuggcuucagcugcugccgucacauuugugcagaggcaggaggaaggaagaaguuccagagaguugaguuuccacacagcaacucccaauuucauuuccuuggccagacugugacacggccaccccuagcucuagucuuccaaggugguugagucuuucugaauggguugccuuugcauuggaaucuggcccagggaugaugccacuguuuuuggugacugguucuuguguuugaagccgcugacaugagcuugguacuguucuauggaguucagcacuaucuuacauguuuugcagggguagcccuuuccagcuggaaagucagugacagcaggguccgccagccgcccauagcgugccauuaguuugagcuuggucuccuguuuucuguguuucuugcccacauaauguuguugagccaugacagggucguugaaaguugcauggcagaggcugcagaacuugucugggucuaucaucucucuauucuggugcaaggcuuccaccuuaguggacugcugcuucagcuuuaaguucuuugcgugggucuuccccagguagugcgacugggccacgacaggggaggaaaaggucauguuacagauggggcagcacugguucuugucuuugcuucugcugcucuucugaucugagucuagcuucuucguuucccccuuuaaugucuccauuccauggauugcuagguaucucuucacuuuguuggcauguuuuuugcucugguaaugugccagcuucugggacucagaaauaagcaaggcgcagcaaaccuuacacuggguguuggugaagagacauugguucuucuggaucaugugcuccacugguucagggagcucagccuguggugucaaacugggaauuccuggcuccuuuuccaugucaccaaugcuggcacuggauuuaucacaaacauuuaaccguggcccagcugaaucuaagcagucagcaugauuuugcucugucagugguuccucaaguaugcuugcugaaggaguucuaugcucuggaaacucaucccgccccuccugcacagggucacuaggaaguaagacccuaaaggcacacucagaguuuucuuucucuuuaaaucuguucaugcgcuuacgagguuuagugcgccuuugguuuaaacgcugccaccgcuuuuuaggcaccacuugauuuacaccauugaguucaucauucucacuguucauuacagaguccagcucugggccuuuuccguuuucaaaagagaguccuuuuucagaaauuuuaccaggaucagauugcuuaaccuugcuaucgaaaugcacaucagaaaaauggucaccaucuucacuuguuaaguggcccauuaucugaaggggauccucuuuacuaggaucuucugccccaccucucaaugaaccuccacguucucggucucccugcaguacagcaucaagagucacacuuggaagcugauucaguuuucuuuugcgcucggucuuuaaggcuuuacgguucacuguguucuuuaccauuugggcugaaaaagcaucucgcaauuuggaugaaggcuuugaucguccacaguugcgccuaguaacacagucugaacgacuuuuaccagaagcagggaggucucucuugucggacaguaagccagguagggaagcagacaacucgccagauaaugcagagucacccccacuagggcuaggauuggcggaguucugagugccaucucccuuuuucucugaauuguguguggagccuccugaaaccaaaaccuuagagacuccuacaggacuauuaguagaacaguccccacgaccaggacuccgguaagagaccagguuuugagcagucaucaaccgcugcuccuucgucuuacuaucaugcauaucuuucaacaucauuagcaauguacugaauuuguagucugguucaauagguaugugauucugacuagaagcagaagagaaaaguaaugguuuugauggcuuugauguuccagagucacugacauccucaccuaaggaucuguaagagaguuccuucaacucggauaaaacauguuucaccacugcuguuucuaugucacuugaaucccugguuuucucaugcauauuguucaguaguuuuagaccauccacuuucccacuuuuagaaaugcuggccaaaggagagccuuugguaucagaagagcagcauuucaaacugcacuccucauuuauaacuggggguucugccauaacuggauuuucuuuguguuugcacuuuauacuucggaacuugggcuguuugcuuuucgaauguaauagagcuugauuugcugccccacccuuuauuaacgaguucucacuggauaugcuugaugacagguugaauuuuggagagagagcaucauuuguaaaaucugacugggguuugugaacaagaguagaugccuucagaucagagagauuaaccugagacgucucgguuccaggcucugcacucuuaguacaacccauuaaguggucuguaugugaguuacuaaugagaggcuucuguuuugcuuuuacccuaguguuuguggcagcaaaccuagaauacuuuaucuuuucauuuuucugcauagauaacauguucucuguucuaucgaaagcaucuggaauuucaaggacacuguuaucagacucugagcuguguucuaugggauccaggucacugcuuccaucaucagaagugguacagauacuaauggaaucacuucgcuuuuccucaucaccugcuccaauauagcagagcuucacuuuugaaccacacaccaggcuucguugggguuuauucuucucucgagaacacuuugagaucaaagcacccucaggcaagcccaauaaagagucaccauuugaagucucaaauucuuucuuugcaguguuuuuuccacaggaagaaaacagaaaacuuccuggggcaguguuggacccugugaggcuauuugcuauccuggaaaguucauuagaggccugcguaucagauauauccccagagauaaaguuuaggccaagguucucuggaaucuuuccccuccguucaucuuuaugugcuucaaauuguauguggcccuuuuucacacuaguccuuuuuggauuaucagagcucuuucuggcucgagauuuagcgcaaggcuuuuccuucucaucugcagaauguucagaaucaaaagccagugauuucaaacagccauuaagcaacaggucauguucugacucaggaucauuugugcagucuucaaauggcauaucuucuucacuguccaacuugauugaaccaggaauacauuuucgguucuuugaccccuugggaacaucauacuguucugcaaguccaacacuggcuucccauuuacucaaaauuuucugaggaacaaauggcaauuccugugaaguagaugaugaugaaguuccagguaauucuagcauguuuccuaauguacugguacuggaaucuggaucauccugaaaagauaaauuuauugaguuuaauugcucuucuauuguaauguuugugucuccuagugaaaagggggcugggagaagggcugcuuuuucauugcugccguccacuucauuucuuugcuuauuuuucuguguuucagucugaggagcuaauggcaagaauggcgauuugacugcaccgugucuacucucuggugugcugucuuguucacuucccauggccacuuuuacaccauucucugauuuagucucauaauugcagguggcauuggucugaguuuccucaaagaucuccucuauacucucauccucugugacuggcuguucuggguccauuucagaaucuacaucugcaucguccacacaaguaaaauucucaaagugcagaaagccauucuugauagucuuuguuacuuuuaccuggaguucaggggaguuauuacaagaggguuccuguuucauagcaagugcuguaggaccaccaggacucaaggaagugcaaacaauuggcgucugagcucuugaaucacuuuuuucagggucuugaaaggauucugauccaucagcagacccauuuaaauacucuacauugaucauggaggccaaauccuguagucuccgcaguggaauguaacaagauggagaaucuuguccauaagcauuuugggauguuccacugacagucgauaacugcauaguacacccauuaaguggcucagaaaaauuggauugaccauuaccgaaagggcuguccuugucuucaggggcaucuaaauucacuggauuggaaaagggcagcagacaauuucuucuggguaguucacaggucugauccauccugggccggcaucaac

SEQ ID NO: 2031 - RNA, 3022 nt, Homo sapiens
uuagauagagucuuguuauguugcccuggcuggagugcagugguuauucacaggcaugaucacagcauacuucaggcuggaacuccugggcuugaauggucuuucugccuuagccuccugagcagcugggacuauaggugcaugacgccgcaccuggccauaacacuccuucucagcucauuuuugagucaugaaaaaugcucuuucaagaaucaccaggccuaugauaagucccauggaacaaaccuaucacuguguaagagcugagcaggagaaaaccaucucuccucauacaccucauuuguucauucaauaaaaauucaugacacaccacuauggacaucaggaaguagagaugaauaaggcugggucucugcccuaagugauuagccuggaaagccauacuggacacaguguccauacuggccuccuugucuccuuuccugccccucccugcacuccuuuacauaacagccagaacaguucucucaaacauaaagcagauccccagcuuaaacccuuuaaagaccuucaugaggcccuaugugacaggagaagcaggagaaggugguggaugagaagaugaggcuguacugaguucagggcaccugaacucaagggagacuuucacagggugcucgacucugucccaacuccuaaagugacuacuggggacuacugaggucugaauggggugggggugaggggucaagacagacauacuagauccaauggcaauauggcucaaaacccuaggucuguuaaguuguagucuggcccaugagggaaauucuuuauuuggaugcuucagugaccaagagacagagcauuaggcacacacagaagcacacacauacacacaaacacacacacacacacacacacauccacacacaauaugcaaagcaaaggcauuucacaggugaagggauagggagugggggaaggaggccacgagagcagcuaggggcuucuuugacacaaugaagagaagccucugauggugacacuccuuggaauucucgucucaagguuacaaggaaaaaucuauccguguggacucagucccaggccauaaaacacagcaaagauagagaaaucuggguguggggccugggaaacgccuguuccucacuguagaaaccugcaucagcucucucuuucuuucccugggacccagaaaucacccgguggaugauggggaaggcuagcaccacagcaaacugggcaagugguccgcugcacaagggggaagagagggcuaguagggccgaggguagcaaugaaccucacagcuagcgggcaugaggcagucugccuuuaggggcagaacccucagggagacuugcauguggggcacuuucccguguaaccuagggucagagcaccucugauggaggaggggaaaggucccauccccauuggaguguccuaugaucucaguggacauggaggccgcccccagccccagcucguugccaacugcugcagauccuuagcaccauucaggaacuguggagggggcagcggggguagcaaugcuccgccaagauugugucacugcuccaggaggauacuucacaguuggcagaaaccugcgcaacuggccauaucuggucuaagacucaggaaagccugcaccuucugggggaaggcagagugucguauuagcuccaagcucccauguugcagccauuuccucuguuuccugcccugccccagguuuggcaugaaaguuccagguuuugcuggaaaugucuagggcccagagagaucucugcucuuuaguugcaagaacuggcccaaaacugaccuuuagaggaaagacagguggcaggggccucagcaccuaaggcccagagggguugggaaauggggaaagccacccuccaaacuaccaccccgcgagaccccgagucucucaauacccuugccuccccugucaugaccuacaggaccccugccaaaggggagcagcaggagugaauuagcccggaccaaugagaggcugucuguggcccaauccugccucaggcccguguacuuuccuggugagaacaacgagcaagagggagccaagggcugagcagucacgggaagcuggcucauggcuggcccaauaugggaugcugggcagaaucaccucuagucuuccaaggugguugagucuuucugaauggguugccuuugcauuggaaucuggcccagggaugaugccacuguuuuuggugacugguucuuguguuugaagccgcugacaugagcuugguacuguucuauggaguucagcacuaucuuacauguuuugcagggguagcccuuuccagcuuucauuuuugaauguguguuaaucaacggaucagaacaaauccugcagggccaccaugggcgucucuugaauuuugcccagaugagaucuccaacuucauacuucaguggcguagacuuuuucuuagguugacacccucacaaccuuacaagacagcauuaucucgauuuugcagauaaagaaacugaggcucaaaaagguuaagucacaggcugggugcgguggcucaugccuguaaucccagcacuuugggaggccaaggugggagaaucacuggaggucaggaguucaagaccagccuggcaaacauggugaaaccccaucucuacuaaaaauacaaagauuagccgagcaugguggugugugccuguaaucccagcuacuugggagguugaggcagaagaaucgcuugaaccugggaggcggagguugcagugagccaagaucuuaccacugcauuccagccugggcaacggagugagauuccagaaauggcaauuccugugaaguagaugaugaugaaguuccagguaauucuagcauguuuccuaauguacugguacuggaaucuggaucauccgaaagggcuguccuugucuucaggggcaucuaaauucacuggauuggaaaagggcagcagacaauuucuucuggguaguucacaggucugauccauccugggccggcaucaac

SEQ ID NO: 2032 - RNA, 3721 nt, Homo sapiens
aaacaaguuuuauuuugagaacauuuuaaaauacagaaaaaguacacagggucauaccauacccagcugcucagaauugacaauuguucauuaccauuucuuuuuuuuaaguugaaacagggucucauuauguugcccaggcuggucuugaacuccugggcucaagcaaucugccugucucggccuccaaaagugcugggaguacaggcuugagccaccgcaccuggccuauuuuaucauucuuuuccaacccuuuucuaccuuggcuucuccacaggcuccagggaggucuagcuuggcuggucaaaacggaggugacauugacagaaagugagugauuaaagguugggugucagagucggacagaucuggguuuuuuuuggagacagagucuuacucugucgcucaggcuggaaugcaguggcacgaucuaggcucacugcaaccaccaccuccuggguucaagugauucuccugccucagccaccugaguagcugggauuacgggugugugccaccacgcccagcuaauuuuuguauuuuugguagagacgggguuuugccauuguuggccaggcuugaacuccuggccacaggagaucugcuggccucagucucccaaagggcugggauuauaggugugagccaccuugcccagugacagaucuggguuugagucccgaaaacucuuuguggucacggacaaaucacuuaaccucaagccucaguuucaucuucugugaaaugggaauaauacaucuuccgugaggacucaguaugaugauguaugucaagcacaaugccagugccuggcauauaccccuugcucacugaagaguagccaauaugaauauuugcagcuaugggccugggacccacccaaaagcaugggcaacacccuccugugaccgaaagggagggacugugagaaugaccccuccucagccuucauuucuccucauuucccacccguccucaauucuggguacaucugucuccaguuuauacucugaagacagcagggcugugaguuacagguugcccagggcauuuuuguggaggcagagaguuuagagcugaugacagccugggagagcucuggggaggcuuccaaaccaaaguggauggaggggaacuggggaggagggaucugagugagguuagucccggcuaaccucacucaguucuaacuacccugggcugguccuggggcuucucacagccucaguagcaccccccguccccuuauucacuggucucggauacucuagaccuguggccuggcuugcuaggacaggggcuuucaggcuuugccagacucagccucucuagacuugggccuacaagccucacacccaccggguguuggcaugcacgucuguuuggaggaggaccgacagcugggaaguggcagaggcugggcuggaagggugagaggguugguggucuccagggaagcgggaaguaaacucgugcccuucuguacuuugcccggugcccuggaccauggaggguuucguuggggugugaauaacagaaaccuaagugagcagggccuaaaugaaacaguguauccaucucucacuuagccccacguccagagguggguguagguuggucugaagucaggguugaggacucguccguucuccagguuuuucucucauggucgcaagauguuggcuucagcugcugccgucacauuugugcagaggcaggaggaaggaagaaguuccagagaguugaguuuccacacagcaacucccaauuucauuuccuuggccagacugugacacggccaccccuagcucuagucuuccaaggugguugagucuuucugaauggguugccuuugcauuggaaucuggcccagggaugaugccacuguuuuuggugacugguucuuguguuugaagccgcugacaugagcuugguacuguucuauggaguucagcacuaucuuacauguuuugcagggguagcccuuuccagcuggaaagucagugacagcaggguccgccagccgcccauagcgugccauuaguuugagcuuggucuccuguuuucuguguuucuugcccacauaauguuguugagccaugacagggucguugaaaguugcauggcagaggcugcagaacuugucugggucuaucaucucucuauucuggugcaaggcuuccaccuuaguggacugcugcuucagcuuuaaguucuuugcgugggucuuccccagguagugcgacugggccacgacaggggaggaaaaggucauguuacagauggggcagcacugguucuugucuuugcuucugcugcucuucugaucugagucuagcuucuucguuucccccuuuaaugucuccauuccauggauugcuagguaucucuucacuuuguuggcauguuuuuugcucugguaaugugccagcuucugggacucagaaauaagcaaggcgcagcaaaccuuacacuggguguuggugaagagacauugguucuucuggaucaugugcuccacuuucauuuuugaauguguguuaaucaacggaucagaacaaauccugcagggccaccaugggcgucucuugaauuuugcccagaugagaucuccaacuucauacuucaguggcguagacuuuuucuuagguugacaaaauggcaauuccugugaaguagaugaugaugaaguuccagguaauucuagcauguuuccuaauguacugguacuggaaucuggaucauccugaaaagauaaauuuauugaguuuaauugcucuucuauuguaauguuugugucuccuagugaaaagggggcugggagaagggcugcuuuuucauugcugccguccacuucauuucuuugcuuauuuuucuguguuucagucugaggagcuaauggcaagaauggcgauuugacugcaccgugucuacucucuggugugcugucuuguucacuucccauggccacuuuuacaccauucucugauuuagucucauaauugcagguggcauuggucugaguuuccucaaagaucuccucuauacucucauccucugugacuggcuguucuggguccauuucagaaucuacaucugcaucguccacacaaguaaaauucucaaagugcagaaagccauucuugauagucuuuguuacuuuuaccuggaguucaggggaguuauuacaagaggguuccuguuucauagcaagugcuguaggaccaccaggacucaaggaagugcaaacaauuggcgucugagcucuugaaucacuuuuuucagggucuugaaaggauucugauccaucagcagacccauuuaaauacucuacauugaucauggaggccaaauccuguagucuccgcaguggaauguaacaagauggagaaucuuguccauaagcauuuugggauguuccacugacagucgauaacugcauaguacacccauuaaguggcucagaaaaauuggauugaccauuaccgaaagggcuguccuugucuucaggggcaucuaaauucacuggauuggaaaagggcagcagacaauuucuucuggguaguucacaggucugauccauccugggccggcaucaaccgugccccgcgcccccucccgggccagcuggggggagggggugacccucauuacacuggggugcgagcggagcgguggggagagagcggggccgcucgccgcaccccccuccccccgcguc

SEQ ID NO: 2033 - RNA, 6187 nt, Homo sapiens
uuagauagagucuuguuauguugcccuggcuggagugcagugguuauucacaggcaugaucacagcauacuucaggcuggaacuccugggcuugaauggucuuucugccuuagccuccugagcagcugggacuauaggugcaugacgccgcaccuggccauaacacuccuucucagcucauuuuugagucaugaaaaaugcucuuucaagaaucaccaggccuaugauaagucccauggaacaaaccuaucacuguguaagagcugagcaggagaaaaccaucucuccucauacaccucauuuguucauucaauaaaaauucaugacacaccacuauggacaucaggaaguagagaugaauaaggcugggucucugcccuaagugauuagccuggaaagccauacuggacacaguguccauacuggccuccuugucuccuuuccugccccucccugcacuccuuuacauaacagccagaacaguucucucaaacauaaagcagauccccagcuuaaacccuuuaaagaccuucaugaggcccuaugugacaggagaagcaggagaaggugguggaugagaagaugaggcuguacugaguucagggcaccugaacucaagggagacuuucacagggugcucgacucugucccaacuccuaaagugacuacuggggacuacugaggucugaauggggugggggugaggggucaagacagacauacuagauccaauggcaauauggcucaaaacccuaggucuguuaaguuguagucuggcccaugagggaaauucuuuauuuggaugcuucagugaccaagagacagagcauuaggcacacacagaagcacacacauacacacaaacacacacacacacacacacacauccacacacaauaugcaaagcaaaggcauuucacaggugaagggauagggagugggggaaggaggccacgagagcagcuaggggcuucuuugacacaaugaagagaagccucugauggugacacuccuuggaauucucgucucaagguuacaaggaaaaaucuauccguguggacucagucccaggccauaaaacacagcaaagauagagaaaucuggguguggggccugggaaacgccuguuccucacuguagaaaccugcaucagcucucucuuucuuucccugggacccagaaaucacccgguggaugauggggaaggcuagcaccacagcaaacugggcaagugguccgcugcacaagggggaagagagggcuaguagggccgaggguagcaaugaaccucacagcuagcgggcaugaggcagucugccuuuaggggcagaacccucagggagacuugcauguggggcacuuucccguguaaccuagggucagagcaccucugauggaggaggggaaaggucccauccccauuggaguguccuaugaucucaguggacauggaggccgcccccagccccagcucguugccaacugcugcagauccuuagcaccauucaggaacuguggagggggcagcggggguagcaaugcuccgccaagauugugucacugcuccaggaggauacuucacaguuggcagaaaccugcgcaacuggccauaucuggucuaagacucaggaaagccugcaccuucugggggaaggcagagugucguauuagcuccaagcucccauguugcagccauuuccucuguuuccugcccugccccagguuuggcaugaaaguuccagguuuugcuggaaaugucuagggcccagagagaucucugcucuuuaguugcaagaacuggcccaaaacugaccuuuagaggaaagacagguggcaggggccucagcaccuaaggcccagagggguugggaaauggggaaagccacccuccaaacuaccaccccgcgagaccccgagucucucaauacccuugccuccccugucaugaccuacaggaccccugccaaaggggagcagcaggagugaauuagcccggaccaaugagaggcugucuguggcccaauccugccucaggcccguguacuuuccuggugagaacaacgagcaagagggagccaagggcugagcagucacgggaagcuggcucauggcuggcccaauaugggaugcugggcagaaucaccucuagucuuccaaggugguugagucuuucugaauggguugccuuugcauuggaaucuggcccagggaugaugccacuguuuuuggugacugguucuuguguuugaagccgcugacaugagcuugguacuguucuauggaguucagcacuaucuuacauguuuugcagggguagcccuuuccagcuggaaagucagugacagcaggguccgccagccgcccauagcgugccauuaguuugagcuuggucuccuguuuucuguguuucuugcccacauaauguuguugagccaugacagggucguugaaaguugcauggcagaggcugcagaacuugucugggucuaucaucucucuauucuggugcaaggcuuccaccuuaguggacugcugcuucagcuuuaaguucuuugcgugggucuuccccagguagugcgacugggccacgacaggggaggaaaaggucauguuacagauggggcagcacugguucuugucuuugcuucugcugcucugguaaugugccagcuucugggacucagaaauaagcaaggcgcagcaaaccuuacacuggguguuggugaagagacauugguucuucuggaucaugugcuccacugguucagggagcucagccuguggugucaaacugggaauuccuggcuccuuuuccaugucaccaaugcuggcacuggauuuaucacaaacauuuaaccguggcccagcugaaucuaagcagucagcaugauuuugcucugucagugguuccucaaguaugcuugcugaaggaguucuaugcucuggaaacucaucccgccccuccugcacagggucacuaggaaguaagacccuaaaggcacacucagaguuuucuuucucuuuaaaucuguucaugcgcuuacgagguuuagugcgccuuugguuuaaacgcugccaccgcuuuuuaggcaccacuugauuuacaccauugaguucaucauucucacuguucauuacagaguccagcucugggccuuuuccguuuucaaaagagaguccuuuuucagaaauuuuaccaggaucagauugcuuaaccuugcuaucgaaaugcacaucagaaaaauggucaccaucuucacuuguuaaguggcccauuaucugaaggggauccucuuuacuaggaucuucugccccaccucucaaugaaccuccacguucucggucucccugcaguacagcaucaagagucacacuuggaagcugauucaguuuucuuuugcgcucggucuuuaaggcuuuacgguucacuguguucuuuaccauuugggcugaaaaagcaucucgcaauuuggaugaaggcuuugaucguccacaguugcgccuaguaacacagucugaacgacuuuuaccagaagcagggaggucucucuugucggacaguaagccagguagggaagcagacaacucgccagauaaugcagagucacccccacuagggcuaggauuggcggaguucugagugccaucucccuuuuucucugaauuguguguggagccuccugaaaccaaaaccuuagagacuccuacaggacuauuaguagaacaguccccacgaccaggacuccgguaagagaccagguuuugagcagucaucaaccgcugcuccuucgucuuacuaucaugcauaucuuucaacaucauuagcaauguacugaauuuguagucugguucaauagguaugugauucugacuagaagcagaagagaaaaguaaugguuuugauggcuuugauguuccagagucacugacauccucaccuaaggaucuguaagagaguuccuucaacucggauaaaacauguuucaccacugcuguuucuaugucacuugaaucccugguuuucucaugcauauuguucaguaguuuuagaccauccacuuucccacuuuuagaaaugcuggccaaaggagagccuuugguaucagaagagcagcauuucaaacugcacuccucauuuauaacuggggguucugccauaacuggauuuucuuuguguuugcacuuuauacuucggaacuugggcuguuugcuuuucgaauguaauagagcuugauuugcugccccacccuuuauuaacgaguucucacuggauaugcuugaugacagguugaauuuuggagagagagcaucauuuguaaaaucugacugggguuugugaacaagaguagaugccuucagaucagagagauuaaccugagacgucucgguuccaggcucugcacucuuaguacaacccauuaaguggucuguaugugaguuacuaaugagaggcuucuguuuugcuuuuacccuaguguuuguggcagcaaaccuagaauacuuuaucuuuucauuuuucugcauagauaacauguucucuguucuaucgaaagcaucuggaauuucaaggacacuguuaucagacucugagcuguguucuaugggauccaggucacugcuuccaucaucagaagugguacagauacuaauggaaucacuucgcuuuuccucaucaccugcuccaauauagcagagcuucacuuuugaaccacacaccaggcuucguugggguuuauucuucucucgagaacacuuugagaucaaagcacccucaggcaagcccaauaaagagucaccauuugaagucucaaauucuuucuuugcaguguuuuuuccacaggaagaaaacagaaaacuuccuggggcaguguuggacccugugaggcuauuugcuauccuggaaaguucauuagaggccugcguaucagauauauccccagagauaaaguuuaggccaagguucucuggaaucuuuccccuccguucaucuuuaugugcuucaaauuguauguggcccuuuuucacacuaguccuuuuuggauuaucagagcucuuucuggcucgagauuuagcgcaaggcuuuuccuucucaucugcagaauguucagaaucaaaagccagugauuucaaacagccauuaagcaacaggucauguucugacucaggaucauuugugcagucuucaaauggcauaucuucuucacuguccaacuugauugaaccaggaauacauuuucgguucuuugaccccuugggaacaucauacuguucugcaaguccaacacuggcuucccauuuacucaaaauuuucugaggaaccuuaugccuauauccuuuuucuuucuguuucccucuucuccuaaggacagguagcucuucgaauugaugucugccuucaaacaugacgauugcuuuuccagccacccaggcucucucagaaggaucuccaaaagccuccacguaguacugccgauagggccuccgguuggaaacuuucauuuuugaauguguguuaaucaacggaucagaacaaauccugcagggccaccaugggcgucucuugaauuuugcccagaugagaucuccaacuucauacuucaguggcguagacuuuuucuuagguugacacccucacaaccuuacaagacagcauuaucucgauuuugcagauaaagaaacugaggcucaaaaagguuaagucacaggcugggugcgguggcucaugccuguaaucccagcacuuugggaggccaaggugggagaaucacuggaggucaggaguucaagaccagccuggcaaacauggugaaaccccaucucuacuaaaaauacaaagauuagccgagcaugguggugugugccuguaaucccagcuacuugggagguugaggcagaagaaucgcuugaaccugggaggcggagguugcagugagccaagaucuuaccacugcauuccagccugggcaacggagugagauuccagaaauggcaauuccugugaaguagaugaugaugaaguuccagguaauucuagcauguuuccuaauguacugguacuggaaucuggaucauccgaaagggcuguccuugucuucaggggcaucuaaauucacuggauuggaaaagggcagcagacaauuucuucuggguaguucacaggucugauccauccugggccggcaucaac

SEQ ID NO: 2034 - RNA, 7661 nt, Homo sapiens
aaacaaguuuuauuuugagaacauuuuaaaauacagaaaaaguacacagggucauaccauacccagcugcucagaauugacaauuguucauuaccauuucuuuuuuuuaaguugaaacagggucucauuauguugcccaggcuggucuugaacuccugggcucaagcaaucugccugucucggccuccaaaagugcugggaguacaggcuugagccaccgcaccuggccuauuuuaucauucuuuuccaacccuuuucuaccuuggcuucuccacaggcuccagggaggucuagcuuggcuggucaaaacggaggugacauugacagaaagugagugauuaaagguugggugucagagucggacagaucuggguuuuuuuuggagacagagucuuacucugucgcucaggcuggaaugcaguggcacgaucuaggcucacugcaaccaccaccuccuggguucaagugauucuccugccucagccaccugaguagcugggauuacgggugugugccaccacgcccagcuaauuuuuguauuuuugguagagacgggguuuugccauuguuggccaggcuugaacuccuggccacaggagaucugcuggccucagucucccaaagggcugggauuauaggugugagccaccuugcccagugacagaucuggguuugagucccgaaaacucuuuguggucacggacaaaucacuuaaccucaagccucaguuucaucuucugugaaaugggaauaauacaucuuccgugaggacucaguaugaugauguaugucaagcacaaugccagugccuggcauauaccccuugcucacugaagaguagccaauaugaauauuugcagcuaugggccugggacccacccaaaagcaugggcaacacccuccugugaccgaaagggagggacugugagaaugaccccuccucagccuucauuucuccucauuucccacccguccucaauucuggguacaucugucuccaguuuauacucugaagacagcagggcugugaguuacagguugcccagggcauuuuuguggaggcagagaguuuagagcugaugacagccugggagagcucuggggaggcuuccaaaccaaaguggauggaggggaacuggggaggagggaucugagugagguuagucccggcuaaccucacucaguucuaacuacccugggcugguccuggggcuucucacagccucaguagcaccccccguccccuuauucacuggucucggauacucuagaccuguggccuggcuugcuaggacaggggcuuucaggcuuugccagacucagccucucuagacuugggccuacaagccucacacccaccggguguuggcaugcacgucuguuuggaggaggaccgacagcugggaaguggcagaggcugggcuggaagggugagaggguugguggucuccagggaagcgggaaguaaacucgugcccuucuguacuuugcccggugcccuggaccauggaggguuucguuggggugugaauaacagaaaccuaagugagcagggccuaaaugaaacaguguauccaucucucacuuagccccacguccagagguggguguagguuggucugaagucaggguugaggacucguccguucuccagguuuuucucucauggucgcaagauguuggcuucagcugcugccgucacauuugugcagaggcaggaggaaggaagaaguuccagagaguugaguuuccacacagcaacucccaauuucauuuccuuggccagacugugacacggccaccccuagcucuagucuuccaaggugguugagucuuucugaauggguugccuuugcauuggaaucuggcccagggaugaugccacuguuuuuggugacugguucuuguguuugaagccgcugacaugagcuugguacuguucuauggaguucagcacuaucuuacauguuuugcagggguagcccuuuccagcuggaaagucagugacagcaggguccgccagccgcccauagcgugccauuaguuugagcuuggucuccuguuuucuguguuucuugcccacauaauguuguugagccaugacagggucguugaaaguugcauggcagaggcugcagaacuugucugggucuaucaucucucuauucuggugcaaggcuuccaccuuaguggacugcugcuucagcuuuaaguucuuugcgugggucuuccccagguagugcgacugggccacgacaggggaggaaaaggucauguuacagauggggcagcacugguucuugucuuugcuucugcugcucuucugaucugagucuagcuucuucguuucccccuuuaaugucuccauuccauggauugcuagguaucucuucacuuuguuggcauguuuuuugcucugguaaugugccagcuucugggacucagaaauaagcaaggcgcagcaaaccuuacacuggguguuggugaagagacauugguucuucuggaucaugugcuccacuuuuuuauaugucccauccacuccuuugcccaucuuauccuugcugcucacgucacccuccauguaagggaagacucgggccuggugaguccacaaauagucauuagauccaaaaaagaggacugggaacucucccacaucaugucucaucuuaucaauguuggaaggaacagcucgaggauggcagaucucagcuggccaccaccuguaucguccaacuuuuacccagacaaucucccuguaguguggcuuuuugccugcuuuacagucauugcaauaccaguuuccuucagggauaucaauguucaggcauucacgaugaaaagcagcagggcaagaaucacagcacagaaggcugccuccuucugagcacacaaagcaccagcuaacauuaacaugcucaugauuucggcagccccgccuagggguaaagugauuagggcagaugauacuauuagaugcaaggaucuuugacccagcagccaggcaaaagucauuggcgugguaugccacaggacagcggacacagcgcaucaaccgaccuuuagaugcagaaacauuggcuggauuagcagcaugacagguuauacagauguggagggagcaccggaagcccuuguucugcauaacaguggguggguacuucuggacacacucuucaugguaaaacuuuccacacaaggguagaaggcaccuuuuaacaucuuccccacucugcuuacauacaaaacagguauggauuccugugcgacauucauugcagauaaauuuuccucuuggcaucucagucaauccaaggcacuccagguggaaagccccacagcacugagccucacauaacagcagcucacccaauuuuucacaauucugacagacauucuccuugagugcagcuccuccaccgcguucacccugcauuuuuuuagaggcaggcaucccgggaucguguucuacaccuuccucaacagucuccuuggggcuuguggccguccugugaggcauuaguucucccucugagccuggaaucucuuuugacgagucaucauuuuucacuuuuuuacacugcaucuuggcugcagcaugccucugucguuuucgcuuccuuggcuugucaaauaucuugguagugccuccaccaaaaucuuuugaauaagauguggcacaagauucaguuaugccauucuccaggugaccagcuucauagcacuuuuuagaaaggccaaggucccccuucuugggcauaaauccagggucuaaaucauuggauucaagaaguuucuuaguugguuuucuuugacguuuacuuucauaauuuccuggcguuuuaacuagcaauuccucagacucaagggcaggccguggagagacuuccggagccacaggcacagacaaggucagcugcggcaacucagcauguccaccuccaaguucugacugagccaaggggcccuccaaaaacggagccucccuuucaagaacuggaggcucuucuuugguugaaaucaaagaauucucguccaccugcuuguucugagcacuagaucgaccucgggcuagaaggcuuuccucuucacagcgggaacuuaccuugugcaccugcuccuguaccuucuuuuguuuuuucuuaggagcaaauaucugaucauauucuucuguauauuccaaaagccacuugcuuggcuuccuaaggcguuucuucucugaccgcacagcugguucagggagcucagccuguggugucaaacugggaauuccuggcuccuuuuccaugucaccaaugcuggcacuggauuuaucacaaacauuuaaccguggcccagcugaaucuaagcagucagcaugauuuugcucugucagugguuccucaaguaugcuugcugaaggaguucuaugcucuggaaacucaucccgccccuccugcacagggucacuaggaaguaagacccuaaaggcacacucagaguuuucuuucucuuuaaaucuguucaugcgcuuacgagguuuagugcgccuuugguuuaaacgcugccaccgcuuuuuaggcaccacuugauuuacaccauugaguucaucauucucacuguucauuacagaguccagcucugggccuuuuccguuuucaaaagagaguccuuuuucagaaauuuuaccaggaucagauugcuuaaccuugcuaucgaaaugcacaucagaaaaauggucaccaucuucacuuguuaaguggcccauuaucugaaggggauccucuuuacuaggaucuucugccccaccucucaaugaaccuccacguucucggucucccugcaguacagcaucaagagucacacuuggaagcugauucaguuuucuuuugcgcucggucuuuaaggcuuuacgguucacuguguucuuuaccauuugggcugaaaaagcaucucgcaauuuggaugaaggcuuugaucguccacaguugcgccuaguaacacagucugaacgacuuuuaccagaagcagggaggucucucuugucggacaguaagccagguagggaagcagacaacucgccagauaaugcagagucacccccacuagggcuaggauuggcggaguucugagugccaucucccuuuuucucugaauuguguguggagccuccugaaaccaaaaccuuagagacuccuacaggacuauuaguagaacaguccccacgaccaggacuccgguaagagaccagguuuugagcagucaucaaccgcugcuccuucgucuuacuaucaugcauaucuuucaacaucauuagcaauguacugaauuuguagucugguucaauagguaugugauucugacuagaagcagaagagaaaaguaaugguuuugauggcuuugauguuccagagucacugacauccucaccuaaggaucuguaagagaguuccuucaacucggauaaaacauguuucaccacugcuguuucuaugucacuugaaucccugguuuucucaugcauauuguucaguaguuuuagaccauccacuuucccacuuuuagaaaugcuggccaaaggagagccuuugguaucagaagagcagcauuucaaacugcacuccucauuuauaacuggggguucugccauaacuggauuuucuuuguguuugcacuuuauacuucggaacuugggcuguuugcuuuucgaauguaauagagcuugauuugcugccccacccuuuauuaacgaguucucacuggauaugcuugaugacagguugaauuuuggagagagagcaucauuuguaaaaucugacugggguuugugaacaagaguagaugccuucagaucagagagauuaaccugagacgucucgguuccaggcucugcacucuuaguacaacccauuaaguggucuguaugugaguuacuaaugagaggcuucuguuuugcuuuuacccuaguguuuguggcagcaaaccuagaauacuuuaucuuuucauuuuucugcauagauaacauguucucuguucuaucgaaagcaucuggaauuucaaggacacuguuaucagacucugagcuguguucuaugggauccaggucacugcuuccaucaucagaagugguacagauacuaauggaaucacuucgcuuuuccucaucaccugcuccaauauagcagagcuucacuuuugaaccacacaccaggcuucguugggguuuauucuucucucgagaacacuuugagaucaaagcacccucaggcaagcccaauaaagagucaccauuugaagucucaaauucuuucuuugcaguguuuuuuccacaggaagaaaacagaaaacuuccuggggcaguguuggacccugugaggcuauuugcuauccuggaaaguucauuagaggccugcguaucagauauauccccagagauaaaguuuaggccaagguucucuggaaucuuuccccuccguucaucuuuaugugcuucaaauuguauguggcccuuuuucacacuaguccuuuuuggauuaucagagcucuuucuggcucgagauuuagcgcaaggcuuuuccuucucaucugcagaauguucagaaucaaaagccagugauuucaaacagccauuaagcaacaggucauguucugacucaggaucauuugugcagucuucaaauggcauaucuucuucacuguccaacuugauugaaccaggaauacauuuucgguucuuugaccccuugggaacaucauacuguucugcaaguccaacacuggcuucccauuuacucaaaauuuucugaggaaccuuaugccuauauccuuuuucuuucuguuucccucuucuccuaaggacagguagcucuucgaauugaugucugccuucaaacaugacgauugcuuuuccagccacccaggcucucucagaaggaucuccaaaagccuccacguaguacugccgauagggccuccgguuggaaacuuucauuuuugaauguguguuaaucaacggaucagaacaaauccugcagggccaccaugggcgucucuugaauuuugcccagaugagaucuccaacuucauacuucaguggcguagacuuuuucuuagguugacacccucacaaccuuacaagacagcauuaucucgauuuugcagauaaagaaacugaggcucaaaaagguuaagucacaggcugggugcgguggcucaugccuguaaucccagcacuuugggaggccaaggugggagaaucacuggaggucaggaguucaagaccagccuggcaaacauggugaaaccccaucucuacuaaaaauacaaagauuagccgagcaugguggugugugccuguaaucccagcuacuugggagguugaggcagaagaaucgcuugaaccugggaggcggagguugcagugagccaagaucuuaccacugcauuccagccugggcaacggagugagauuccagaaauggcaauuccugugaaguagaugaugaugaaguuccagguaauucuagcauguuuccuaauguacugguacuggaaucuggaucauccgaaagggcuguccuugucuucaggggcaucuaaauucacuggauuggaaaagggcagcagacaauuucuucuggguaguucacaggucugauccauccugggccggcaucaac

SEQ ID NO: 2035 - RNA, 2408 nt, Homo sapiens
aaacaaguuuuauuuugagaacauuuuaaaauacagaaaaaguacacagggucauaccauacccagcugcucagaauugacaauuguucauuaccauuucuuuuuuuuaaguugaaacagggucucauuauguugcccaggcuggucuugaacuccugggcucaagcaaucugccugucucggccuccaaaagugcugggaguacaggcuugagccaccgcaccuggccuauuuuaucauucuuuuccaacccuuuucuaccuuggcuucuccacaggcuccagggaggucuagcuuggcuggucaaaacggaggugacauugacagaaagugagugauuaaagguugggugucagagucggacagaucuggguuuuuuuuggagacagagucuuacucugucgcucaggcuggaaugcaguggcacgaucuaggcucacugcaaccaccaccuccuggguucaagugauucuccugccucagccaccugaguagcugggauuacgggugugugccaccacgcccagcuaauuuuuguauuuuugguagagacgggguuuugccauuguuggccaggcuugaacuccuggccacaggagaucugcuggccucagucucccaaagggcugggauuauaggugugagccaccuugcccagugacagaucuggguuugagucccgaaaacucuuuguggucacggacaaaucacuuaaccucaagccucaguuucaucuucugugaaaugggaauaauacaucuuccgugaggacucaguaugaugauguaugucaagcacaaugccagugccuggcauauaccccuugcucacugaagaguagccaauaugaauauuugcagcuaugggccugggacccacccaaaagcaugggcaacacccuccugugaccgaaagggagggacugugagaaugaccccuccucagccuucauuucuccucauuucccacccguccucaauucuggguacaucugucuccaguuuauacucugaagacagcagggcugugaguuacagguugcccagggcauuuuuguggaggcagagaguuuagagcugaugacagccugggagagcucuggggaggcuuccaaaccaaaguggauggaggggaacuggggaggagggaucugagugagguuagucccggcuaaccucacucaguucuaacuacccugggcugguccuggggcuucucacagccucaguagcaccccccguccccuuauucacuggucucggauacucuagaccuguggccuggcuugcuaggacaggggcuuucaggcuuugccagacucagccucucuagacuugggccuacaagccucacacccaccggguguuggcaugcacgucuguuuggaggaggaccgacagcugggaaguggcagaggcugggcuggaagggugagaggguugguggucuccagggaagcgggaaguaaacucgugcccuucuguacuuugcccggugcccuggaccauggaggguuucguuggggugugaauaacagaaaccuaagugagcagggccuaaaugaaacaguguauccaucucucacuuagccccacguccagagguggguguagguuggucugaagucaggguugaggacucguccguucuccagguuuuucucucauggucgcaagauguuggcuucagcugcugccgucacauuugugcagaggcaggaggaaggaagaaguuccagagaguugaguuuccacacagcaacucccaauuucauuuccuuggccagacugugacacggccaccccuagcucuagucuuccaaggugguugagucuuucugaauggguugccuuugcauuggaaucuggcccagggaugaugccacuguuuuuggugacugguucuuguguuugaagccgcugacaugagcuugguacuguucuauggaguucagcacuaucuuacauguuuugcagggguagcccuuuccagcuuucauuuuugaauguguguuaaucaacggaucagaacaaauccugcagggccaccaugggcgucucuugaauuuugcccagaugagaucuccaacuucauacuucaguggcguagacuuuuucuuagguugacaaaauggcaauuccugugaaguagaugaugaugaaguuccagguaauucuagcauguuuccuaauguacugguacuggaaucuggaucauccgaaagggcuguccuugucuucaggggcaucuaaauucacuggauuggaaaagggcagcagacaauuucuucuggguaguucacaggucugauccauccugggccggcaucaaccugggggcuugggcuggggucuucgaggccucaggccccgagcagacgcggccgcaggcgaacccccuacccggcc

SEQ ID NO: 2036 - skipped

SEQ ID NO: 2037 - RNA, 7737 nt, Homo sapiens
aaacaaguuuuauuuugagaacauuuuaaaauacagaaaaaguacacagggucauaccauacccagcugcucagaauugacaauuguucauuaccauuucuuuuuuuuaaguugaaacagggucucauuauguugcccaggcuggucuugaacuccugggcucaagcaaucugccugucucggccuccaaaagugcugggaguacaggcuugagccaccgcaccuggccuauuuuaucauucuuuuccaacccuuuucuaccuuggcuucuccacaggcuccagggaggucuagcuuggcuggucaaaacggaggugacauugacagaaagugagugauuaaagguugggugucagagucggacagaucuggguuuuuuuuggagacagagucuuacucugucgcucaggcuggaaugcaguggcacgaucuaggcucacugcaaccaccaccuccuggguucaagugauucuccugccucagccaccugaguagcugggauuacgggugugugccaccacgcccagcuaauuuuuguauuuuugguagagacgggguuuugccauuguuggccaggcuugaacuccuggccacaggagaucugcuggccucagucucccaaagggcugggauuauaggugugagccaccuugcccagugacagaucuggguuugagucccgaaaacucuuuguggucacggacaaaucacuuaaccucaagccucaguuucaucuucugugaaaugggaauaauacaucuuccgugaggacucaguaugaugauguaugucaagcacaaugccagugccuggcauauaccccuugcucacugaagaguagccaauaugaauauuugcagcuaugggccugggacccacccaaaagcaugggcaacacccuccugugaccgaaagggagggacugugagaaugaccccuccucagccuucauuucuccucauuucccacccguccucaauucuggguacaucugucuccaguuuauacucugaagacagcagggcugugaguuacagguugcccagggcauuuuuguggaggcagagaguuuagagcugaugacagccugggagagcucuggggaggcuuccaaaccaaaguggauggaggggaacuggggaggagggaucugagugagguuagucccggcuaaccucacucaguucuaacuacccugggcugguccuggggcuucucacagccucaguagcaccccccguccccuuauucacuggucucggauacucuagaccuguggccuggcuugcuaggacaggggcuuucaggcuuugccagacucagccucucuagacuugggccuacaagccucacacccaccggguguuggcaugcacgucuguuuggaggaggaccgacagcugggaaguggcagaggcugggcuggaagggugagaggguugguggucuccagggaagcgggaaguaaacucgugcccuucuguacuuugcccggugcccuggaccauggaggguuucguuggggugugaauaacagaaaccuaagugagcagggccuaaaugaaacaguguauccaucucucacuuagccccacguccagagguggguguagguuggucugaagucaggguugaggacucguccguucuccagguuuuucucucauggucgcaagauguuggcuucagcugcugccgucacauuugugcagaggcaggaggaaggaagaaguuccagagaguugaguuuccacacagcaacucccaauuucauuuccuuggccagacugugacacggccaccccuagcucuagucuuccaaggugguugagucuuucugaauggguugccuuugcauuggaaucuggcccagggaugaugccacuguuuuuggugacugguucuuguguuugaagccgcugacaugagcuugguacuguucuauggaguucagcacuaucuuacauguuuugcagggguagcccuuuccagcuggaaagucagugacagcaggguccgccagccgcccauagcgugccauuaguuugagcuuggucuccuguuuucuguguuucuugcccacauaauguuguugagccaugacagggucguugaaaguugcauggcagaggcugcagaacuugucugggucuaucaucucucuauucuggugcaaggcuuccaccuuaguggacugcugcuucagcuuuaaguucuuugcgugggucuuccccagguagugcgacugggccacgacaggggaggaaaaggucauguuacagauggggcagcacugguucuugucuuugcuucugcugcucuucugaucugagucuagcuucuucguuucccccuuuaaugucuccauuccauggauugcuagguaucucuucacuuuguuggcauguuuuuugcucugguaaugugccagcuucugggacucagaaauaagcaaggcgcagcaaaccuuacacuggguguuggugaagagacauugguucuucuggaucaugugcuccacuuuuuuauaugucccauccacuccuuugcccaucuuauccuugcugcucacgucacccuccauguaagggaagacucgggccuggugaguccacaaauagucauuagauccaaaaaagaggacugggaacucucccacaucaugucucaucuuaucaauguuggaaggaacagcucgaggauggcagaucucagcuggccaccaccuguaucguccaacuuuuacccagacaaucucccuguaguguggcuuuuugccugcuuuacagucauugcaauaccaguuuccuucagggauaucaauguucaggcauucacgaugaaaagcagcagggcaagaaucacagcacagaaggcugccuccuucugagcacacaaagcaccagcuaacauuaacaugcucaugauuucggcagccccgccuagggguaaagugauuagggcagaugauacuauuagaugcaaggaucuuugacccagcagccaggcaaaagucauuggcgugguaugccacaggacagcggacacagcgcaucaaccgaccuuuagaugcagaaacauuggcuggauuagcagcaugacagguuauacagauguggagggagcaccggaagcccuuguucugcauaacaguggguggguacuucuggacacacucuucaugguaaaacuuuccacacaaggguagaaggcaccuuuuaacaucuuccccacucugcuuacauacaaaacagguauggauuccugugcgacauucauugcagauaaauuuuccucuuggcaucucagucaauccaaggcacuccagguggaaagccccacagcacugagccucacauaacagcagcucacccaauuuuucacaauucugacagacauucuccuugagugcagcuccuccaccgcguucacccugcauuuuuuuagaggcaggcaucccgggaucguguucuacaccuuccucaacagucuccuuggggcuuguggccguccugugaggcauuaguucucccucugagccuggaaucucuuuugacgagucaucauuuuucacuuuuuuacacugcaucuuggcugcagcaugccucugucguuuucgcuuccuuggcuugucaaauaucuugguagugccuccaccaaaaucuuuugaauaagauguggcacaagauucaguuaugccauucuccaggugaccagcuucauagcacuuuuuagaaaggccaaggucccccuucuugggcauaaauccagggucuaaaucauuggauucaagaaguuucuuaguugguuuucuuugacguuuacuuucauaauuuccuggcguuuuaacuagcaauuccucagacucaagggcaggccguggagagacuuccggagccacaggcacagacaaggucagcugcggcaacucagcauguccaccuccaaguucugacugagccaaggggcccuccaaaaacggagccucccuuucaagaacuggaggcucuucuuugguugaaaucaaagaauucucguccaccugcuuguucugagcacuagaucgaccucgggcuagaaggcuuuccucuucacagcgggaacuuaccuugugcaccugcuccuguaccuucuuuuguuuuuucuuaggagcaaauaucugaucauauucuucuguauauuccaaaagccacuugcuuggcuuccuaaggcguuucuucucugaccgcacagcugguucagggagcucagccuguggugucaaacugggaauuccuggcuccuuuuccaugucaccaaugcuggcacuggauuuaucacaaacauuuaaccguggcccagcugaaucuaagcagucagcaugauuuugcucugucagugguuccucaaguaugcuugcugaaggaguucuaugcucuggaaacucaucccgccccuccugcacagggucacuaggaaguaagacccuaaaggcacacucagaguuuucuuucucuuuaaaucuguucaugcgcuuacgagguuuagugcgccuuugguuuaaacgcugccaccgcuuuuuaggcaccacuugauuuacaccauugaguucaucauucucacuguucauuacagaguccagcucugggccuuuuccguuuucaaaagagaguccuuuuucagaaauuuuaccaggaucagauugcuuaaccuugcuaucgaaaugcacaucagaaaaauggucaccaucuucacuuguuaaguggcccauuaucugaaggggauccucuuuacuaggaucuucugccccaccucucaaugaaccuccacguucucggucucccugcaguacagcaucaagagucacacuuggaagcugauucaguuuucuuuugcgcucggucuuuaaggcuuuacgguucacuguguucuuuaccauuugggcugaaaaagcaucucgcaauuuggaugaaggcuuugaucguccacaguugcgccuaguaacacagucugaacgacuuuuaccagaagcagggaggucucucuugucggacaguaagccagguagggaagcagacaacucgccagauaaugcagagucacccccacuagggcuaggauuggcggaguucugagugccaucucccuuuuucucugaauuguguguggagccuccugaaaccaaaaccuuagagacuccuacaggacuauuaguagaacaguccccacgaccaggacuccgguaagagaccagguuuugagcagucaucaaccgcugcuccuucgucuuacuaucaugcauaucuuucaacaucauuagcaauguacugaauuuguagucugguucaauagguaugugauucugacuagaagcagaagagaaaaguaaugguuuugauggcuuugauguuccagagucacugacauccucaccuaaggaucuguaagagaguuccuucaacucggauaaaacauguuucaccacugcuguuucuaugucacuugaaucccugguuuucucaugcauauuguucaguaguuuuagaccauccacuuucccacuuuuagaaaugcuggccaaaggagagccuuugguaucagaagagcagcauuucaaacugcacuccucauuuauaacuggggguucugccauaacuggauuuucuuuguguuugcacuuuauacuucggaacuugggcuguuugcuuuucgaauguaauagagcuugauuugcugccccacccuuuauuaacgaguucucacuggauaugcuugaugacagguugaauuuuggagagagagcaucauuuguaaaaucugacugggguuugugaacaagaguagaugccuucagaucagagagauuaaccugagacgucucgguuccaggcucugcacucuuaguacaacccauuaaguggucuguaugugaguuacuaaugagaggcuucuguuuugcuuuuacccuaguguuuguggcagcaaaccuagaauacuuuaucuuuucauuuuucugcauagauaacauguucucuguucuaucgaaagcaucuggaauuucaaggacacuguuaucagacucugagcuguguucuaugggauccaggucacugcuuccaucaucagaagugguacagauacuaauggaaucacuucgcuuuuccucaucaccugcuccaauauagcagagcuucacuuuugaaccacacaccaggcuucguugggguuuauucuucucucgagaacacuuugagaucaaagcacccucaggcaagcccaauaaagagucaccauuugaagucucaaauucuuucuuugcaguguuuuuuccacaggaagaaaacagaaaacuuccuggggcaguguuggacccugugaggcuauuugcuauccuggaaaguucauuagaggccugcguaucagauauauccccagagauaaaguuuaggccaagguucucuggaaucuuuccccuccguucaucuuuaugugcuucaaauuguauguggcccuuuuucacacuaguccuuuuuggauuaucagagcucuuucuggcucgagauuuagcgcaaggcuuuuccuucucaucugcagaauguucagaaucaaaagccagugauuucaaacagccauuaagcaacaggucauguucugacucaggaucauuugugcagucuucaaauggcauaucuucuucacuguccaacuugauugaaccaggaauacauuuucgguucuuugaccccuugggaacaucauacuguucugcaaguccaacacuggcuucccauuuacucaaaauuuucugaggaacaaauggcaauuccugugaaguagaugaugaugaaguuccagguaauucuagcauguuuccuaauguacugguacuggaaucuggaucauccugaaaagauaaauuuauugaguuuaauugcucuucuauuguaauguuugugucuccuagugaaaagggggcugggagaagggcugcuuuuucauugcugccguccacuucauuucuuugcuuauuuuucuguguuucagucugaggagcuaauggcaagaauggcgauuugacugcaccgugucuacucucuggugugcugucuuguucacuucccauggccacuuuuacaccauucucugauuuagucucauaauugcagguggcauuggucugaguuuccucaaagaucuccucuauacucucauccucugugacuggcuguucuggguccauuucagaaucuacaucugcaucguccacacaaguaaaauucucaaagugcagaaagccauucuugauagucuuuguuacuuuuaccuggaguucaggggaguuauuacaagaggguuccuguuucauagcaagugcuguaggaccaccaggacucaaggaagugcaaacaauuggcgucugagcucuugaaucacuuuuuucagggucuugaaaggauucugauccaucagcagacccauuuaaauacucuacauugaucauggaggccaaauccuguagucuccgcaguggaauguaacaagauggagaaucuuguccauaagcauuuugggauguuccacugacagucgauaacugcauaguacacccauuaaguggcucagaaaaauuggauugaccauuaccgaaagggcuguccuugucuucaggggcaucuaaauucacuggauuggaaaagggcagcagacaauuucuucuggguaguucacaggucugauccauccugggccggcaucaac

SEQ ID NO: 2038 - RNA, 7423 nt, Homo sapiens
aaacaaguuuuauuuugagaacauuuuaaaauacagaaaaaguacacagggucauaccauacccagcugcucagaauugacaauuguucauuaccauuucuuuuuuuuaaguugaaacagggucucauuauguugcccaggcuggucuugaacuccugggcucaagcaaucugccugucucggccuccaaaagugcugggaguacaggcuugagccaccgcaccuggccuauuuuaucauucuuuuccaacccuuuucuaccuuggcuucuccacaggcuccagggaggucuagcuuggcuggucaaaacggaggugacauugacagaaagugagugauuaaagguugggugucagagucggacagaucuggguuuuuuuuggagacagagucuuacucugucgcucaggcuggaaugcaguggcacgaucuaggcucacugcaaccaccaccuccuggguucaagugauucuccugccucagccaccugaguagcugggauuacgggugugugccaccacgcccagcuaauuuuuguauuuuugguagagacgggguuuugccauuguuggccaggcuugaacuccuggccacaggagaucugcuggccucagucucccaaagggcugggauuauaggugugagccaccuugcccagugacagaucuggguuugagucccgaaaacucuuuguggucacggacaaaucacuuaaccucaagccucaguuucaucuucugugaaaugggaauaauacaucuuccgugaggacucaguaugaugauguaugucaagcacaaugccagugccuggcauauaccccuugcucacugaagaguagccaauaugaauauuugcagcuaugggccugggacccacccaaaagcaugggcaacacccuccugugaccgaaagggagggacugugagaaugaccccuccucagccuucauuucuccucauuucccacccguccucaauucuggguacaucugucuccaguuuauacucugaagacagcagggcugugaguuacagguugcccagggcauuuuuguggaggcagagaguuuagagcugaugacagccugggagagcucuggggaggcuuccaaaccaaaguggauggaggggaacuggggaggagggaucugagugagguuagucccggcuaaccucacucaguucuaacuacccugggcugguccuggggcuucucacagccucaguagcaccccccguccccuuauucacuggucucggauacucuagaccuguggccuggcuugcuaggacaggggcuuucaggcuuugccagacucagccucucuagacuugggccuacaagccucacacccaccggguguuggcaugcacgucuguuuggaggaggaccgacagcugggaaguggcagaggcugggcuggaagggugagaggguugguggucuccagggaagcgggaaguaaacucgugcccuucuguacuuugcccggugcccuggaccauggaggguuucguuggggugugaauaacagaaaccuaagugagcagggccuaaaugaaacaguguauccaucucucacuuagccccacguccagagguggguguagguuggucugaagucaggguugaggacucguccguucuccagguuuuucucucauggucgcaagauguuggcuucagcugcugccgucacauuugugcagaggcaggaggaaggaagaaguuccagagaguugaguuuccacacagcaacucccaauuucauuuccuuggccagacugugacacggccaccccuagcucuagucuuccaaggugguugagucuuucugaauggguugccuuugcauuggaaucuggcccagggaugaugccacuguuuuuggugacugguucuuguguuugaagccgcugacaugagcuugguacuguucuauggaguucagcacuaucuuacauguuuugcagggguagcccuuuccagcuggaaagucagugacagcaggguccgccagccgcccauagcgugccauuaguuugagcuuggucuccuguuuucuguguuucuugcccacauaauguuguugagccaugacagggucguugaaaguugcauggcagaggcugcagaacuugucugggucuaucaucucucuauucuggugcaaggcuuccaccuuaguggacugcugcuucagcuuuaaguucuuugcgugggucuuccccagguagugcgacugggccacgacaggggaggaaaaggucauguuacagauggggcagcacugguucuugucuuugcuucugcugcucuucugaucugagucuagcuucuucguuucccccuuuaaugucuccauuccauggauugcuagguaucucuucacuuuguuggcauguuuuuugcucugguaaugugccagcuucugggacucagaaauaagcaaggcgcagcaaaccuuacacuggguguuggugaagagacauugguucuucuggaucaugugcuccacugugcgacauucauugcagauaaauuuuccucuuggcaucucagucaauccaaggcacuccagguggaaagccccacagcacugagccucacauaacagcagcucacccaauuuuucacaauucugacagacauucuccuugagugcagcuccuccaccgcguucacccugcauuuuuuuagaggcaggcaucccgggaucguguucuacaccuuccucaacagucuccuuggggcuuguggccguccugugaggcauuaguucucccucugagccuggaaucucuuuugacgagucaucauuuuucacuuuuuuacacugcaucuuggcugcagcaugccucugucguuuucgcuuccuuggcuugucaaauaucuugguagugccuccaccaaaaucuuuugaauaagauguggcacaagauucaguuaugccauucuccaggugaccagcuucauagcacuuuuuagaaaggccaaggucccccuucuugggcauaaauccagggucuaaaucauuggauucaagaaguuucuuaguugguuuucuuugacguuuacuuucauaauuuccuggcguuuuaacuagcaauuccucagacucaagggcaggccguggagagacuuccggagccacaggcacagacaaggucagcugcggcaacucagcauguccaccuccaaguucugacugagccaaggggcccuccaaaaacggagccucccuuucaagaacuggaggcucuucuuugguugaaaucaaagaauucucguccaccugcuuguucugagcacuagaucgaccucgggcuagaaggcuuuccucuucacagcgggaacuuaccuugugcaccugcuccuguaccuucuuuuguuuuuucuuaggagcaaauaucugaucauauucuucuguauauuccaaaagccacuugcuuggcuuccuaaggcguuucuucucugaccgcacagcugguucagggagcucagccuguggugucaaacugggaauuccuggcuccuuuuccaugucaccaaugcuggcacuggauuuaucacaaacauuuaaccguggcccagcugaaucuaagcagucagcaugauuuugcucugucagugguuccucaaguaugcuugcugaaggaguucuaugcucuggaaacucaucccgccccuccugcacagggucacuaggaaguaagacccuaaaggcacacucagaguuuucuuucucuuuaaaucuguucaugcgcuuacgagguuuagugcgccuuugguuuaaacgcugccaccgcuuuuuaggcaccacuugauuuacaccauugaguucaucauucucacuguucauuacagaguccagcucugggccuuuuccguuuucaaaagagaguccuuuuucagaaauuuuaccaggaucagauugcuuaaccuugcuaucgaaaugcacaucagaaaaauggucaccaucuucacuuguuaaguggcccauuaucugaaggggauccucuuuacuaggaucuucugccccaccucucaaugaaccuccacguucucggucucccugcaguacagcaucaagagucacacuuggaagcugauucaguuuucuuuugcgcucggucuuuaaggcuuuacgguucacuguguucuuuaccauuugggcugaaaaagcaucucgcaauuuggaugaaggcuuugaucguccacaguugcgccuaguaacacagucugaacgacuuuuaccagaagcagggaggucucucuugucggacaguaagccagguagggaagcagacaacucgccagauaaugcagagucacccccacuagggcuaggauuggcggaguucugagugccaucucccuuuuucucugaauuguguguggagccuccugaaaccaaaaccuuagagacuccuacaggacuauuaguagaacaguccccacgaccaggacuccgguaagagaccagguuuugagcagucaucaaccgcugcuccuucgucuuacuaucaugcauaucuuucaacaucauuagcaauguacugaauuuguagucugguucaauagguaugugauucugacuagaagcagaagagaaaaguaaugguuuugauggcuuugauguuccagagucacugacauccucaccuaaggaucuguaagagaguuccuucaacucggauaaaacauguuucaccacugcuguuucuaugucacuugaaucccugguuuucucaugcauauuguucaguaguuuuagaccauccacuuucccacuuuuagaaaugcuggccaaaggagagccuuugguaucagaagagcagcauuucaaacugcacuccucauuuauaacuggggguucugccauaacuggauuuucuuuguguuugcacuuuauacuucggaacuugggcuguuugcuuuucgaauguaauagagcuugauuugcugccccacccuuuauuaacgaguucucacuggauaugcuugaugacagguugaauuuuggagagagagcaucauuuguaaaaucugacugggguuugugaacaagaguagaugccuucagaucagagagauuaaccugagacgucucgguuccaggcucugcacucuuaguacaacccauuaaguggucuguaugugaguuacuaaugagaggcuucuguuuugcuuuuacccuaguguuuguggcagcaaaccuagaauacuuuaucuuuucauuuuucugcauagauaacauguucucuguucuaucgaaagcaucuggaauuucaaggacacuguuaucagacucugagcuguguucuaugggauccaggucacugcuuccaucaucagaagugguacagauacuaauggaaucacuucgcuuuuccucaucaccugcuccaauauagcagagcuucacuuuugaaccacacaccaggcuucguugggguuuauucuucucucgagaacacuuugagaucaaagcacccucaggcaagcccaauaaagagucaccauuugaagucucaaauucuuucuuugcaguguuuuuuccacaggaagaaaacagaaaacuuccuggggcaguguuggacccugugaggcuauuugcuauccuggaaaguucauuagaggccugcguaucagauauauccccagagauaaaguuuaggccaagguucucuggaaucuuuccccuccguucaucuuuaugugcuucaaauuguauguggcccuuuuucacacuaguccuuuuuggauuaucagagcucuuucuggcucgagauuuagcgcaaggcuuuuccuucucaucugcagaauguucagaaucaaaagccagugauuucaaacagccauuaagcaacaggucauguucugacucaggaucauuugugcagucuucaaauggcauaucuucuucacuguccaacuugauugaaccaggaauacauuuucgguucuuugaccccuugggaacaucauacuguucugcaaguccaacacuggcuucccauuuacucaaaauuuucugaggaaccuuaugccuauauccuuuuucuuucuguuucccucuucuccuaaggacagguagcucuucgaauugaugucugccuucaaacaugacgauugcuuuuccagccacccaggcucucucagaaggaucuccaaaagccuccacguaguacugccgauagggccuccgguuggaaacuuucauuuuugaauguguguuaaucaacggaucagaacaaauccugcagggccaccaugggcgucucuugaauuuugcccagaugagaucuccaacuucauacuucaguggcguagacuuuuucuuagguugacaaaauggcaauuccugugaaguagaugaugaugaaguuccagguaauucuagcauguuuccuaauguacugguacuggaaucuggaucauccugaaaagauaaauuuauugaguuuaauugcucuucuauuguaauguuugugucuccuagugaaaagggggcugggagaagggcugcuuuuucauugcugccguccacuucauuucuuugcuuauuuuucuguguuucagucugaggagcuaauggcaagaauggcgauuugacugcaccgugucuacucucuggugugcugucuuguucacuucccauggccacuuuuacaccauucucugauuuagucucauaauugcagguggcauuggucugaguuuccucaaagaucuccucuauacucucauccucugugacuggcuguucuggguccauuucagaaucuacaucugcaucguccacacaaguaaaauucucaaagugcagaaagccauucuugauagucuuuguuacuuuuaccuggaguucaggggaguuauuacaagaggguuccuguuucauagcaagugcuguaggaccaccaggacucaaggaagugcaaacaauuggcgucugagcucuugaaucacuuuuuucagggucuugaaaggauucugauccaucagcagacccauuuaaauacucuacauugaucauggaggccaaauccuguagucuccgcaguggaauguaacaagauggagaaucuuguccauaagcauuuugggauguuccacugacagucgauaacugcauaguacacccauuaaguggcucagaaaaauuggauugaccauuaccgaaagggcuguccuugucuucaggggcaucuaaauucacuggauuggaaaagggcagcagacaauuucuucuggguaguucacaggucugauccauccugggccggcaucaaccgugccccgcgcccccucccgggccagcuggggggagggggugacccucauuacacuggggugcgagcggagcgguggggagagagcggggccgcucgccgcaccccccuccccccgcguc

SEQ ID NO: 2039 - RNA, 7976 nt, Homo sapiens
uuagauagagucuuguuauguugcccuggcuggagugcagugguuauucacaggcaugaucacagcauacuucaggcuggaacuccugggcuugaauggucuuucugccuuagccuccugagcagcugggacuauaggugcaugacgccgcaccuggccauaacacuccuucucagcucauuuuugagucaugaaaaaugcucuuucaagaaucaccaggccuaugauaagucccauggaacaaaccuaucacuguguaagagcugagcaggagaaaaccaucucuccucauacaccucauuuguucauucaauaaaaauucaugacacaccacuauggacaucaggaaguagagaugaauaaggcugggucucugcccuaagugauuagccuggaaagccauacuggacacaguguccauacuggccuccuugucuccuuuccugccccucccugcacuccuuuacauaacagccagaacaguucucucaaacauaaagcagauccccagcuuaaacccuuuaaagaccuucaugaggcccuaugugacaggagaagcaggagaaggugguggaugagaagaugaggcuguacugaguucagggcaccugaacucaagggagacuuucacagggugcucgacucugucccaacuccuaaagugacuacuggggacuacugaggucugaauggggugggggugaggggucaagacagacauacuagauccaauggcaauauggcucaaaacccuaggucuguuaaguuguagucuggcccaugagggaaauucuuuauuuggaugcuucagugaccaagagacagagcauuaggcacacacagaagcacacacauacacacaaacacacacacacacacacacacauccacacacaauaugcaaagcaaaggcauuucacaggugaagggauagggagugggggaaggaggccacgagagcagcuaggggcuucuuugacacaaugaagagaagccucugauggugacacuccuuggaauucucgucucaagguuacaaggaaaaaucuauccguguggacucagucccaggccauaaaacacagcaaagauagagaaaucuggguguggggccugggaaacgccuguuccucacuguagaaaccugcaucagcucucucuuucuuucccugggacccagaaaucacccgguggaugauggggaaggcuagcaccacagcaaacugggcaagugguccgcugcacaagggggaagagagggcuaguagggccgaggguagcaaugaaccucacagcuagcgggcaugaggcagucugccuuuaggggcagaacccucagggagacuugcauguggggcacuuucccguguaaccuagggucagagcaccucugauggaggaggggaaaggucccauccccauuggaguguccuaugaucucaguggacauggaggccgcccccagccccagcucguugccaacugcugcagauccuuagcaccauucaggaacuguggagggggcagcggggguagcaaugcuccgccaagauugugucacugcuccaggaggauacuucacaguuggcagaaaccugcgcaacuggccauaucuggucuaagacucaggaaagccugcaccuucugggggaaggcagagugucguauuagcuccaagcucccauguugcagccauuuccucuguuuccugcccugccccagguuuggcaugaaaguuccagguuuugcuggaaaugucuagggcccagagagaucucugcucuuuaguugcaagaacuggcccaaaacugaccuuuagaggaaagacagguggcaggggccucagcaccuaaggcccagagggguugggaaauggggaaagccacccuccaaacuaccaccccgcgagaccccgagucucucaauacccuugccuccccugucaugaccuacaggaccccugccaaaggggagcagcaggagugaauuagcccggaccaaugagaggcugucuguggcccaauccugccucaggcccguguacuuuccuggugagaacaacgagcaagagggagccaagggcugagcagucacgggaagcuggcucauggcuggcccaauaugggaugcugggcagaaucaccucuagucuuccaaggugguugagucuuucugaauggguugccuuugcauuggaaucuggcccagggaugaugccacuguuuuuggugacugguucuuguguuugaagccgcugacaugagcuugguacuguucuauggaguucagcacuaucuuacauguuuugcagggguagcccuuuccagcuggaaagucagugacagcaggguccgccagccgcccauagcgugccauuaguuugagcuuggucuccuguuuucuguguuucuugcccacauaauguuguugagccaugacagggucguugaaaguugcauggcagaggcugcagaacuugucugggucuaucaucucucuauucuggugcaaggcuuccaccuuaguggacugcugcuucagcuuuaaguucuuugcgugggucuuccccagguagugcgacugggccacgacaggggaggaaaaggucauguuacagauggggcagcacugguucuugucuuugcuucugcugcucugguaaugugccagcuucugggacucagaaauaagcaaggcgcagcaaaccuuacacuggguguuggugaagagacauugguucuucuggaucaugugcuccacuuuuuuauaugucccauccacuccuuugcccaucuuauccuugcugcucacgucacccuccauguaagggaagacucgggccuggugaguccacaaauagucauuagauccaaaaaagaggacugggaacucucccacaucaugucucaucuuaucaauguuggaaggaacagcucgaggauggcagaucucagcuggccaccaccuguaucguccaacuuuuacccagacaaucucccuguaguguggcuuuuugccugcuuuacagucauugcaauaccaguuuccuucagggauaucaauguucaggcauucacgaugaaaagcagcagggcaagaaucacagcacagaaggcugccuccuucugagcacacaaagcaccagcuaacauuaacaugcucaugauuucggcagccccgccuagggguaaagugauuagggcagaugauacuauuagaugcaaggaucuuugacccagcagccaggcaaaagucauuggcgugguaugccacaggacagcggacacagcgcaucaaccgaccuuuagaugcagaaacauuggcuggauuagcagcaugacagguuauacagauguggagggagcaccggaagcccuuguucugcauaacaguggguggguacuucuggacacacucuucaugguaaaacuuuccacacaaggguagaaggcaccuuuuaacaucuuccccacucugcuuacauacaaaacagguauggauuccugugcgacauucauugcagauaaauuuuccucuuggcaucucagucaauccaaggcacuccagguggaaagccccacagcacugagccucacauaacagcagcucacccaauuuuucacaauucugacagacauucuccuugagugcagcuccuccaccgcguucacccugcauuuuuuuagaggcaggcaucccgggaucguguucuacaccuuccucaacagucuccuuggggcuuguggccguccugugaggcauuaguucucccucugagccuggaaucucuuuugacgagucaucauuuuucacuuuuuuacacugcaucuuggcugcagcaugccucugucguuuucgcuuccuuggcuugucaaauaucuugguagugccuccaccaaaaucuuuugaauaagauguggcacaagauucaguuaugccauucuccaggugaccagcuucauagcacuuuuuagaaaggccaaggucccccuucuugggcauaaauccagggucuaaaucauuggauucaagaaguuucuuaguugguuuucuuugacguuuacuuucauaauuuccuggcguuuuaacuagcaauuccucagacucaagggcaggccguggagagacuuccggagccacaggcacagacaaggucagcugcggcaacucagcauguccaccuccaaguucugacugagccaaggggcccuccaaaaacggagccucccuuucaagaacuggaggcucuucuuugguugaaaucaaagaauucucguccaccugcuuguucugagcacuagaucgaccucgggcuagaaggcuuuccucuucacagcgggaacuuaccuugugcaccugcuccuguaccuucuuuuguuuuuucuuaggagcaaauaucugaucauauucuucuguauauuccaaaagccacuugcuuggcuuccuaaggcguuucuucucugaccgcacagcugguucagggagcucagccuguggugucaaacugggaauuccuggcuccuuuuccaugucaccaaugcuggcacuggauuuaucacaaacauuuaaccguggcccagcugaaucuaagcagucagcaugauuuugcucugucagugguuccucaaguaugcuugcugaaggaguucuaugcucuggaaacucaucccgccccuccugcacagggucacuaggaaguaagacccuaaaggcacacucagaguuuucuuucucuuuaaaucuguucaugcgcuuacgagguuuagugcgccuuugguuuaaacgcugccaccgcuuuuuaggcaccacuugauuuacaccauugaguucaucauucucacuguucauuacagaguccagcucugggccuuuuccguuuucaaaagagaguccuuuuucagaaauuuuaccaggaucagauugcuuaaccuugcuaucgaaaugcacaucagaaaaauggucaccaucuucacuuguuaaguggcccauuaucugaaggggauccucuuuacuaggaucuucugccccaccucucaaugaaccuccacguucucggucucccugcaguacagcaucaagagucacacuuggaagcugauucaguuuucuuuugcgcucggucuuuaaggcuuuacgguucacuguguucuuuaccauuugggcugaaaaagcaucucgcaauuuggaugaaggcuuugaucguccacaguugcgccuaguaacacagucugaacgacuuuuaccagaagcagggaggucucucuugucggacaguaagccagguagggaagcagacaacucgccagauaaugcagagucacccccacuagggcuaggauuggcggaguucugagugccaucucccuuuuucucugaauuguguguggagccuccugaaaccaaaaccuuagagacuccuacaggacuauuaguagaacaguccccacgaccaggacuccgguaagagaccagguuuugagcagucaucaaccgcugcuccuucgucuuacuaucaugcauaucuuucaacaucauuagcaauguacugaauuuguagucugguucaauagguaugugauucugacuagaagcagaagagaaaaguaaugguuuugauggcuuugauguuccagagucacugacauccucaccuaaggaucuguaagagaguuccuucaacucggauaaaacauguuucaccacugcuguuucuaugucacuugaaucccugguuuucucaugcauauuguucaguaguuuuagaccauccacuuucccacuuuuagaaaugcuggccaaaggagagccuuugguaucagaagagcagcauuucaaacugcacuccucauuuauaacuggggguucugccauaacuggauuuucuuuguguuugcacuuuauacuucggaacuugggcuguuugcuuuucgaauguaauagagcuugauuugcugccccacccuuuauuaacgaguucucacuggauaugcuugaugacagguugaauuuuggagagagagcaucauuuguaaaaucugacugggguuugugaacaagaguagaugccuucagaucagagagauuaaccugagacgucucgguuccaggcucugcacucuuaguacaacccauuaaguggucuguaugugaguuacuaaugagaggcuucuguuuugcuuuuacccuaguguuuguggcagcaaaccuagaauacuuuaucuuuucauuuuucugcauagauaacauguucucuguucuaucgaaagcaucuggaauuucaaggacacuguuaucagacucugagcuguguucuaugggauccaggucacugcuuccaucaucagaagugguacagauacuaauggaaucacuucgcuuuuccucaucaccugcuccaauauagcagagcuucacuuuugaaccacacaccaggcuucguugggguuuauucuucucucgagaacacuuugagaucaaagcacccucaggcaagcccaauaaagagucaccauuugaagucucaaauucuuucuuugcaguguuuuuuccacaggaagaaaacagaaaacuuccuggggcaguguuggacccugugaggcuauuugcuauccuggaaaguucauuagaggccugcguaucagauauauccccagagauaaaguuuaggccaagguucucuggaaucuuuccccuccguucaucuuuaugugcuucaaauuguauguggcccuuuuucacacuaguccuuuuuggauuaucagagcucuuucuggcucgagauuuagcgcaaggcuuuuccuucucaucugcagaauguucagaaucaaaagccagugauuucaaacagccauuaagcaacaggucauguucugacucaggaucauuugugcagucuucaaauggcauaucuucuucacuguccaacuugauugaaccaggaauacauuuucgguucuuugaccccuugggaacaucauacuguucugcaaguccaacacuggcuucccauuuacucaaaauuuucugaggaacaaauggcaauuccugugaaguagaugaugaugaaguuccagguaauucuagcauguuuccuaauguacugguacuggaaucuggaucauccugaaaagauaaauuuauugaguuuaauugcucuucuauuguaauguuugugucuccuagugaaaagggggcugggagaagggcugcuuuuucauugcugccguccacuucauuucuuugcuuauuuuucuguguuucagucugaggagcuaauggcaagaauggcgauuugacugcaccgugucuacucucuggugugcugucuuguucacuucccauggccacuuuuacaccauucucugauuuagucucauaauugcagguggcauuggucugaguuuccucaaagaucuccucuauacucucauccucugugacuggcuguucuggguccauuucagaaucuacaucugcaucguccacacaaguaaaauucucaaagugcagaaagccauucuugauagucuuuguuacuuuuaccuggaguucaggggaguuauuacaagaggguuccuguuucauagcaagugcuguaggaccaccaggacucaaggaagugcaaacaauuggcgucugagcucuugaaucacuuuuuucagggucuugaaaggauucugauccaucagcagacccauuuaaauacucuacauugaucauggaggccaaauccuguagucuccgcaguggaauguaacaagauggagaaucuuguccauaagcauuuugggauguuccacugacagucgauaacugcauaguacacccauuaaguggcucagaaaaauuggauugaccauuaccgaaagggcuguccuugucuucaggggcaucuaaauucacuggauuggaaaagggcagcagacaauuucuucuggguaguucacaggucugauccauccugggccggcaucaac

SEQ ID NO: 2040 - skipped

SEQ ID NO: 2041 - RNA, 3483 nt, Homo sapiens
uuagauagagucuuguuauguugcccuggcuggagugcagugguuauucacaggcaugaucacagcauacuucaggcuggaacuccugggcuugaauggucuuucugccuuagccuccugagcagcugggacuauaggugcaugacgccgcaccuggccauaacacuccuucucagcucauuuuugagucaugaaaaaugcucuuucaagaaucaccaggccuaugauaagucccauggaacaaaccuaucacuguguaagagcugagcaggagaaaaccaucucuccucauacaccucauuuguucauucaauaaaaauucaugacacaccacuauggacaucaggaaguagagaugaauaaggcugggucucugcccuaagugauuagccuggaaagccauacuggacacaguguccauacuggccuccuugucuccuuuccugccccucccugcacuccuuuacauaacagccagaacaguucucucaaacauaaagcagauccccagcuuaaacccuuuaaagaccuucaugaggcccuaugugacaggagaagcaggagaaggugguggaugagaagaugaggcuguacugaguucagggcaccugaacucaagggagacuuucacagggugcucgacucugucccaacuccuaaagugacuacuggggacuacugaggucugaauggggugggggugaggggucaagacagacauacuagauccaauggcaauauggcucaaaacccuaggucuguuaaguuguagucuggcccaugagggaaauucuuuauuuggaugcuucagugaccaagagacagagcauuaggcacacacagaagcacacacauacacacaaacacacacacacacacacacacauccacacacaauaugcaaagcaaaggcauuucacaggugaagggauagggagugggggaaggaggccacgagagcagcuaggggcuucuuugacacaaugaagagaagccucugauggugacacuccuuggaauucucgucucaagguuacaaggaaaaaucuauccguguggacucagucccaggccauaaaacacagcaaagauagagaaaucuggguguggggccugggaaacgccuguuccucacuguagaaaccugcaucagcucucucuuucuuucccugggacccagaaaucacccgguggaugauggggaaggcuagcaccacagcaaacugggcaagugguccgcugcacaagggggaagagagggcuaguagggccgaggguagcaaugaaccucacagcuagcgggcaugaggcagucugccuuuaggggcagaacccucagggagacuugcauguggggcacuuucccguguaaccuagggucagagcaccucugauggaggaggggaaaggucccauccccauuggaguguccuaugaucucaguggacauggaggccgcccccagccccagcucguugccaacugcugcagauccuuagcaccauucaggaacuguggagggggcagcggggguagcaaugcuccgccaagauugugucacugcuccaggaggauacuucacaguuggcagaaaccugcgcaacuggccauaucuggucuaagacucaggaaagccugcaccuucugggggaaggcagagugucguauuagcuccaagcucccauguugcagccauuuccucuguuuccugcccugccccagguuuggcaugaaaguuccagguuuugcuggaaaugucuagggcccagagagaucucugcucuuuaguugcaagaacuggcccaaaacugaccuuuagaggaaagacagguggcaggggccucagcaccuaaggcccagagggguugggaaauggggaaagccacccuccaaacuaccaccccgcgagaccccgagucucucaauacccuugccuccccugucaugaccuacaggaccccugccaaaggggagcagcaggagugaauuagcccggaccaaugagaggcugucuguggcccaauccugccucaggcccguguacuuuccuggugagaacaacgagcaagagggagccaagggcugagcagucacgggaagcuggcucauggcuggcccaauaugggaugcugggcagaaucaccucuagucuuccaaggugguugagucuuucugaauggguugccuuugcauuggaaucuggcccagggaugaugccacuguuuuuggugacugguucuuguguuugaagccgcugacaugagcuugguacuguucuauggaguucagcacuaucuuacauguuuugcagggguagcccuuuccagcuuucauuuuugaauguguguuaaucaacggaucagaacaaauccugcagggccaccaugggcgucucuugaauuuugcccagaugagaucuccaacuucauacuucaguggcguagacuuuuucuuagguugacaaaauggcaauuccugugaaguagaugaugaugaaguuccagguaauucuagcauguuuccuaauguacugguacuggaaucuggaucauccugaaaagauaaauuuauugaguuuaauugcucuucuauuguaauguuugugucuccuagugaaaagggggcugggagaagggcugcuuuuucauugcugccguccacuucauuucuuugcuuauuuuucuguguuucagucugaggagcuaauggcaagaauggcgauuugacugcaccgugucuacucucuggugugcugucuuguucacuucccauggccacuuuuacaccauucucugauuuagucucauaauugcagguggcauuggucugaguuuccucaaagaucuccucuauacucucauccucugugacuggcuguucuggguccauuucagaaucuacaucugcaucguccacacaaguaaaauucucaaagugcagaaagccauucuugauagucuuuguuacuuuuaccuggaguucaggggaguuauuacaagaggguuccuguuucauagcaagugcuguaggaccaccaggacucaaggaagugcaaacaauuggcgucugagcucuugaaucacuuuuuucagggucuugaaaggauucugauccaucagcagacccauuuaaauacucuacauugaucauggaggccaaauccuguagucuccgcaguggaauguaacaagauggagaaucuuguccauaagcauuuugggauguuccacugacagucgauaacugcauaguacacccauuaaguggcucagaaaaauuggauugaccauuaccgaaagggcuguccuugucuucaggggcaucuaaauucacuggauuggaaaagggcagcagacaauuucuucuggguaguucacaggucugauccauccugggccggcaucaaccugggggcuugggcuggggucuucgaggccucaggccccgagcagacgcggccgcaggcgaacccccuacccggcc

SEQ ID NO: 2042-2043 - skipped (2 entries)

SEQ ID NO: 2044 - RNA, 3287 nt, Homo sapiens
ucaaugaaacaaugaagcaauaaaagcacagauuuauugaagcaaaaguauauuccacagagugggagcaggcuaaagcaagcugcucaagagccccaguugcaaaaucugggguuuaaguacccuuuagggguuuccuauugguuacacccuaugcgccaccaaucggaggccgaagugaaggcucccagucuccagacucuuauucuccuagcucaaagaaauccacugauuuccucuguagcaucuucagguuccaucuugacaacuuccucuaaauccccaggggaagaguuguuuagagacuccuggaugcccugagggagcggcuccagagcuugccuucccuccucuguuuucacaacgguccagcgauaggcacuguucucugacaauccuucuuggcacuguuuaucgacugguggaggcccugggcuauguuccacuuuggggaaaacaguagcagagagaggagauaguuccuggggcucuaauuuggguucuaggcccugaaaggcauuuuccccaucagccacagcacaagcaauguccacauucaugugggccuuaucuucagggguggaugguauaggaagauucacagaauugccagaaacaauuaagggugagacagaggaggccacaaggggcugguucaauggacaggggaaggaaguaggguuaaccaagaggguggcgaugggaauagucuggggacucugggccacagccgcauugacaggcuggaucauguuacagccaccgccaaggcucacaaucuucacagugguagcaggaacagugaagauaacagaugcaggguggauaacaggggcagguuugauacagcgaaaggcccuggcuccccuucuuuuugagggucuccgucucacauauggcuuucgaaacauggaagaggcaggggagggcaucauuaccuugggcacaggggcagaagagagcaaagucugggacucagacagagggaagcuuguccuggccucagggggcauagcaggcagugcugcaggagacucaaaacucucaccuccacugacccccaguggagggacaccuggaacugucuguaaaacaguggcuggcuguauugggugaggaauccggagcaccauuuugcucggaggggcuucugaaugaguugauugggcugguguuuucccaggguugaagcugggcuggagagaggggcuggguuggauaaggagggguuucaggacugaugaacgcuucugucuccaagccuucuuggggaaacggucggcaacuggcuucaguuucaggacuacacccuuaggcaauagcaguggguaccgaguuucacuccccaacucugaguugucuuuuucuaggccuugaucugaguugaucucagugguuccagucauauuuccuaccucucuagcaccaucagccaugugccgcaguucuuccuggauggauggcagacuggccuuuaaccagaaugggagccgguguucuucucucucuauagguggcuuccacugauguggcuggaucucuucacagcauuuuccuaggacuggcagcuguuuggucuucuuauaaaauuuaaugauguugucaggagcucuguucauguugagguucuugauucucacugucaguuggcgggcagucuugcagguuagaagguacuuguuguccucagccuuggugaagaggaucuuauccuggggauucuuugccuucagggaacacacuggaaguaacucuggauacaugaaaaccuugcuuguggccaggauccaagccacuugcuuuggcaaacagggaaauucauuggcagucuucuugacaguuuuaugagggcugcagucaaugcugacaugugugcugaagucuucaaucagcugcauagcucccaucaaguuacaggguuggaacagggucugaaacuugggguuguacugauggugaagggcgauggagcuuugagcaaagguucccagcucuuuaagacauauccuggugcuacuggccuccggauugagauugggguugcagguggcaagaagguggauuugugucaagagcugaacaugcugcugcaucugcugcuggagucucuuccuuugugcuggguccagaaucagggucugaugaacuuccuuacacugggguuuaaccuucucuaccuccuucugcuguuuggcugaagguuucuucaucuucagcuguucaaauaguuccuucgcuaucugauguuguucauuuaguagguuggccaguaguuccucaaaccguagagcuugagggguguuaaaguuagcuugaggcucagccacacgcuccuccucuucugggccaucaucuuccauguuggagaaucccaucucaucuuggaaucguuuugaaggacaguguucauucuuuucauccgucaucuuuccacuuuuaagugcuuuccuugggugcuuaauaguuguuuuuauggcaggucgacauacauaguucuccaaguucuuuggagguuuuuuaguucucuuagccuggaggccaauuuucaauuuuaaauuucccucugaaaaguuuguuucuuucacugaaaacuguugcugugcaucagucaaaccaucaucuuucccagcuucgauguuucuuucucgauuccguuugcgaagguccucuuccuccuuuguguuuuuuucuagcucuacuucucucuuacugaccaaugugccaguacugauggcagaaggacucuuucuugaaaaaccuucggaaucagaacccaauccuaacauagcaguauuucuaggguccaucacaagcguauguuauugccaaggaaucuuaugaaaauuuuacagaacuguguuccauaaaaaacaaggaucuccaaaacucgaaaccagcaucuuucucgugucggaggccgaggccgaggccgagagcgaugagagugcagggaaguggggaagaggggguggccgccaggcuccuccgcuucccuggguccacggcggaucccucccgcuugucaggaggcggccagcggguaagcugacuggcggaaaugcgagagaggagaagggaaagguggaaggcuaaagggggcaaacugaggggaggcgggucccgcaaccgagacugggaucgucuccccuccgcaaagcgaacccaaaauggcggcgggagcggcggcggcggcggcggcagcagcagaguggcggcgguggcggcggcagcuccuccagagggagggagcgaagggcgccuagcgccccccucaaccuuccacuccu

SEQ ID NO: 2045 - RNA, 4136 nt, Homo sapiens
uuaauguguaaacgaguuuaauauaauaaguaaaauuucauccuuuccaucucauuucaccucaacuccacaaucaugucccauaaugcauucacaaaucaaauacaaaugauuuuaggacuauccauagugcagcaagcaagcagguggcauaucaauaagugauacauauuacugaguccacgaaauacuugagaauauucuccagcucucaccuggaguucugggacagaaagcacagauuccucagaagcugaugacauuucaucuuccucaucuugggugaggucaucaaaguccucuucuuccucuucuucuggcccauucuucucuccuccaguuucuggcccaacuggaguccccacugacugaccaucaacacuggaugaaucuucuggcuucccuggggggcuacuaagccucacuucaggauccauugaggacaaagcauucuuugaugauccuuuguucacaucugucccugagguuccuucaucagggggcucuugagaagaugaagggguuuuaguuggcugacuccucuccucuuccuucuguaagacugucuguuucguuacuucuccagcacugcucaacuccucgcuuggggcaccaguguccaauuccacagcauguuccacuuugaugucaucacaaauaucacgcucaggggauccacugauuuccucucuagcuucuucagguuccaucuugacaauuuccucuaaauccccagggguaggguuguuuagagacuccuggaugcccugagggagcggcuccagagcuugccuccccuccucuguuuucacaacgguccagcgacaggcacuauucucugacaauccuucuuggcacucugcaucugcuaguggaggcccugggcuauguuccacuuucgggaaaacaguagcagagagaggagauaguuccuggggcucuaauuuggguucuaggcccugaaaggcauuuuccccaucagccacagcacaagcaauguccacauucacgugggccuuaucuucagggguggaugguauaggaagauucacagaauugccagaaacaauuaagggugagacagaggaggccacaagggacugguucaauggacaggggaaggaaguaggguuaaccaagaggguagugaugggaauagucuggggacucugggccacagccgcauugacaggcuggaucauguuacagccaccgccaaggcucacaaucuucacagugguagcaggaacagugaagauaacagaugcagggugguggauaacaggggcagguuucauacagggagaggccuugacuccucuucucuuugagggucuccgucucacauauggcuuucgaaacuuagaaggggcaagggagggcagcauuaccuugggcacaggggcagaagagagcaaagucugggacucagacagagggaagcuuguccuggccucagggggcacagcaggcagugcugcaggagacucaaaacucucaccuccacugacccccaguggagggacaccuggaacugucuguaaaacaguggcuggcuguauugggugaggaauccggagcaccauuuugcucggaggggcuucugaaugaguugaucgggcugguguuuucccaggguugaagcugggcuggagagaggggcuggguuggauaaggaggggcuucaggacugaugaacgcuucugucuccaagccuuccuggggaaacggguggcaacuggcuucaguuucaggacuacacccuuaggcaauagcaguggguaccgagauucacuccccaacuccaaauugucuuuuucuaggcuucgaucugaguugaucucagugguuccagucauauuuccuaccucucuagcaccaucagccaugugccgcaguucuuccuggauggauggcagacuggccuuuaaccagaaugggagccgguguucuucucucucuauagguggcuuccacugauguggcuggaucucuucacagcauuuuccuaggacuggcagcuguuuggucuucuuauaaaauuuaaugauguugucaggagcucuguucauguugagguucuugauucucacugucaguuggugggcaguuuugcagguuagaagguacuugcugauuagaggauuaggaaacucaguuccuucaaaaugcuucaguccuaaagcuaacaaauuguccucagccuuggugaagacgaucuuauccuggggauucuuugccuucagggaacacacuggaaguaacucuggauacaugaaaaccuugcuuguggccagaauccaagccacuugcuuuggcaaacagggaaauucauucgcagucuucuugacaguuuuaugagggcugcagucaaugcugacaugugugcugaagucuucaaucagcugcauagcucccaucaaguuacaggguuggaacagggucugaaacuugggguuguacugauggugaagggcgauggagcuuugagcaaagguucccagcucuuuaagaaauauccuggugguaguggccuccggauugagguugggguugcagguggcaagaagguggauuugggucaagagcugaacgugcugcugcaucugcugcuggagucucuuccucugugcuggguccagaaucagagucugaugaacuuucucacucugggguuuaaccuucucuacuuccugcagcuguuuggcugaagauuucuucaucuucagcuguucaaauagcuccuucacuguccgauguuguucauuuaacagguuggccagugguuccucaaaccguagagcuugagggguguuaaaguuaggacgaggcucagcuacacacuccuccucuucugggccaucaucuuccauguuggagaaucccaucucaucuuggaaaguuucaaacagcucuuccaucagcucauuuacuuccuuuuuggugauucucacugcccggucaguccggaaauccucugugucugguucaucgaggucuuccaggaaauuauauucuggaucaucaucaucaucugcuucaucuucauuccccacaucaucauucauaaguccccccagccacaucuuccaguccucaucaucugccguauuggggucauacauaucuggagugaugucuggagcuuggagcucugccucuaauuggcccaggggaacaucuuucaggggcaucuuagaacgcguucgaaaugcaaugagacugucauccaugggucguuuugaaggacaguguucauucuuuucauccgucaucuuuccacuuuuaagugcuuuccuugggugcuuaauaguuguuuuuauggcaggucgacauacauaguucuccaaguucuuuggagguuuuuuaguucucuuagccuggaggccaauuuucaauuuuaaauuucccucugaaaaguuuguuucuuucacugaaaacuguugcugugcaucagucaaaccaucaucuuucccagcuucgauguuucuuucucgauuccguuugcgaagguccucuuccuccuuuguguuuuuuucuagcucuacuucucucuuacugaccaaugugccaguacugauggcagaaggacucuuucuugaaaaaccuucggaaucagaacccaauccuaacauagcaguauuucuaggguccaucacaagcguauguuauugccaaggaaucuuaugaaaauuuuacagaacuguguuccauaaaaaacaaggaucuccaaaacucgaaaccagcaucuuucucgugucggaggccgaggccgaggccgagagcgaugagagugcagggaaguggggaagaggggguggccgccaggcuccuccgcuucccuggguccacggcggaucccucccgcuugucaggaggcggccagcggguaagcugacuggcggaaaugcgagagaggagaagggaaagguggaaggcuaaagggggcaaacugaggggaggcgggucccgcaaccgagacugggaucgucuccccuccgcaaagcgaacccaaaauggcggcgggagcggcggcggcggcggcggcagcagcagaguggcggcgguggcggcggcagcuccuccagagggagggagcgaagggcgccuagcgccccccucaaccuuccacuccu

SEQ ID NO: 2046 - RNA, 1391 nt, Homo sapiens
uuuaaugauguugucaggagcucuguucauguugagguucuugauucucacugucaguuggcgggcagucuugcagguuagaagguacuugcugauuagaggguuaagaaacucagucccuucaaaaugcuucaguccuaaagcuaacaaacagucuucuugacaguuuuaugagggcugcagucaaugcugacaugugugcugaagucuucaaucagcugcauagcucccaucaaguuacaggguuggaacagggucugaaacuugggguuguacugauggugaagggcgauggagcuuugagcaaagguucccagcucuuuaagacauauccuggugcuacuggccuccggauugagauugggguugcagguggcaagaagguggauuugugucaagagcugaacaugcugcugcaucugcugcuggagucucuuccuuugugcuggguccagaaucagggucugaugaacuuccuuacacugggguuuaaccuucucuaccuccuucugcuguuuggcugaagguuucuucaucuucagcuguucaaauaguuccuucgcuaucugauguuguucauuuaguagguuggccaguaguuccucaaaccguagagcuugagggguguuaaaguuagcuugaggcucagccacacgcuccuccucuucugggccaucaucuuccauguuggagaaucccaucucaucuuggaaucguuuugaaggacaguguucauucuuuucauccgucaucuuuccacuuuuaagugcuuuccuugggugcuuaauaguuguuuuuauggcaggucgacauacauaguucuccaaguucuuuggagguuuuuuaguucucuuagccuggaggccaauuuucaauuuuaaauuucccucugaaaaguuuguuucuuucacugaaaacuguugcugugcaucagucaaaccaucaucuuucccagcuucgauguuucuuucucgauuccguuugcgaagguccucuuccuccuuuguguuuuuuucuagcucuacuucucucuuacugaccaaugugccaguacugauggcagaaggacucuuucuugaaaaaccuucggaaucagaacccaauccuaacauagcaguauuucuaggguccaucacaagcguauguuauugccaaggaaucuuaugaaaauuuuacagaacuguguuccauaaaaaacaaggaucuccaaaacucgaaaccagcaucuuucucgugucggaggccgaggccgaggccgagagcgaugagagugcagggaaguggggaagaggggguggccgccaggcuccuccgcuucccuggguccacggcggaucccucccgcuugucaggaggcggccagcggguaagcugacuucaacggcgcaagc

SEQ ID NO: 2047 - skipped

SEQ ID NO: 2048 - RNA, 2476 nt, Homo sapiens
uuugagacugagucucgcucugucgcccaggcuggagugcaaugaugcuaucuuggcucacugcaaacucugccuccuggguucaagcgauucuccugccucagccucccgaguagcugggacuacaggcgcgugcccccaugccuggcuaauuucuguauuuuuaguagagacgggguuucacuguguucgccaggauggucuccaucuccugacauuguguuccccgugccucggccucccaaaguacugggauuacaggcgugagccaccgcgccuggccuuaguugaucuuaaugaagacaguaaaaagcuaaacaugaccaaacuuuaccaccugacuuucaucuuuaccaggccccaguuuaucucgaucugacuccuaauacuuaccccucauauugcuguaguccaauucuuagcacugagccucagaucucuaccucccauauuccuauacuguccacugccuccacacuuuacccaggcccagagauuaucauguaauucuagaacuuggauaaugaguacaaagggaggauaaaagagagaaggaagaaauuacaaauguccuguguccuccauuccuaggcaaguauccuuaguuaucuaugggauaagauucccaccaccucucaccgcaaguaaaaacuuaaagcugacacaucugucuccuaccagucuucuugacaguuuuaugagggcugcagucaaugcugacaugugugcugaagucuucaaucagcugcauagcucccaucaaguuacaggguuggaacagggucugaaacuugggguuguacugauggugaagggcgauggagcuuugagcaaagguucccagcucuuuaagaaauauccuggugguaguggccuccggauugagguugggguugcagguggcaagaagguggauuugggucaagagcugaacgugcugcugcaucugcugcuggagucucuuccucugugcuggguccagaaucagagucugaugaacuuucucacucugggguuuaaccuucucuacuuccugcagcuguuuggcugaagauuucuucaucuucagcuguucaaauagcuccuucacuguccgauguuguucauuuaacagguuggccagugguuccucaaaccguagagcuugagggguguuaaaguuaggacgaggcucagcuacacacuccuccucuucugggccaucaucuuccauguuggagaaucccaucucaucuuggaaaguuucaaacagcucuuccaucagcucauuuacuuccuuuuuggugauucucacugcccggucaguccggaaauccucugugucugguucaucgaggucuuccaggaaauuauauucuggaucaucaucaucaucugcuucaucuucauuccccacaucaucauucauaaguccccccagccacaucuuccaguccucaucaucugccguauuggggucauacauaucuggagugaugucuggagcuuggagcucugccucuaauuggcccaggggaacaucuuucaggggcaucuuagaacgcguucgaaaugcaaugagacugucauccaugggucguuuugaaggacaguguucauucuuuucauccgucaucuuuccacuuuuaagugcuuuccuugggugcuuaauaguuguuuuuauggcaggucgacauacauaguucuccaaguucuuuggagguuuuuuaguucucuuagccuggaggccaauuuucaauuuuaaauuucccucugaaaaguuuguuucuuucacugaaaacuguugcugugcaucagucaaaccaucaucuuucccagcuucgauguuucuuucucgauuccguuugcgaagguccucuuccuccuuuguguuuuuuucuagcucuacuucucucuuacugaccaaugugccaguacugauggcagaaggacucuuucuugaaaaaccuucggaaucagaacccaauccuaacauagcaguauuucuaggguccaucacaagcguauguuauugccaaggaaucuuaugaaaauuuuacagaacuguguuccauaaaaaacaaggaucuccaaaacucgaaaccagcaucuuucucgugucggaggccgaggccgaggccgagagcgaugagagugcagggaaguggggaagaggggguggccgccaggcuccuccgcuucccuggguccacggcggaucccucccgcuugucaggaggcggccagcggguaagcugacuggcggaaaugcgagagaggagaagggaaagguggaaggcuaaagggggcaaacugaggggaggcgggucccgcaaccgagacugggaucgucuccccuccgcaaagcgaacccaaaauggcggcgggagcggcggcggcggcggcggcagcagcagaguggcggcgguggcggcggcagcuccuccagagggagggagcgaagggcgccuagcgccccccucaaccuuccacuccu

SEQ ID NO: 2049 - RNA, 3367 nt, Homo sapiens
ucaaugaaacaaugaagcaauaaaagcacagauuuauugaagcaaaaguauauuccacagagugggagcaggcuaaagcaagcugcucaagagccccaguugcaaaaucugggguuuaaguacccuuuagggguuuccuauugguuacacccuaugcgccaccaaucggaggccgaagugaaggcucccagucuccagacucuuauucuccuagcucaaagaaauccacugauuuccucuguagcaucuucagguuccaucuugacaacuuccucuaaauccccaggggaagaguuguuuagagacuccuggaugcccugagggagcggcuccagagcuugccuucccuccucuguuuucacaacgguccagcgauaggcacuguucucugacaauccuucuuggcacuguuuaucgacugguggaggcccugggcuauguuccacuuuggggaaaacaguagcagagagaggagauaguuccuggggcucuaauuuggguucuaggcccugaaaggcauuuuccccaucagccacagcacaagcaauguccacauucaugugggccuuaucuucagggguggaugguauaggaagauucacagaauugccagaaacaauuaagggugagacagaggaggccacaaggggcugguucaauggacaggggaaggaaguaggguuaaccaagaggguggcgaugggaauagucuggggacucugggccacagccgcauugacaggcuggaucauguuacagccaccgccaaggcucacaaucuucacagugguagcaggaacagugaagauaacagaugcaggguggauaacaggggcagguuugauacagcgaaaggcccuggcuccccuucuuuuugagggucuccgucucacauauggcuuucgaaacauggaagaggcaggggagggcaucauuaccuugggcacaggggcagaagagagcaaagucugggacucagacagagggaagcuuguccuggccucagggggcauagcaggcagugcugcaggagacucaaaacucucaccuccacugacccccaguggagggacaccuggaacugucuguaaaacaguggcuggcuguauugggugaggaauccggagcaccauuuugcucggaggggcuucugaaugaguugauugggcugguguuuucccaggguugaagcugggcuggagagaggggcuggguuggauaaggagggguuucaggacugaugaacgcuucugucuccaagccuucuuggggaaacggucggcaacuggcuucaguuucaggacuacacccuuaggcaauagcaguggguaccgaguuucacuccccaacucugaguugucuuuuucuaggccuugaucugaguugaucucagugguuccagucauauuuccuaccucucuagcaccaucagccaugugccgcaguucuuccuggauggauggcagacuggccuauuggaaaugagaacacucuuuaaccagaaugggagccgguguucuucucucucuauagguggcuuccacugauguggcuggaucucuucacagcauuuuccuaggacuggcagcuguuuggucuucuuauaaaauuuaaugauguugucaggagcucuguucauguugagguucuugauucucacugucaguuggcgggcagucuugcagguuagaagguacuugcugauuagaggguuaagaaacucagucccuucaaaaugcuucaguccuaaagcuaacaaauuguccucagccuuggugaagaggaucuuauccuggggauucuuugccuucagggaacacacuggaaguaacucuggauacaugaaaaccuugcuuguggccaggauccaagccacuugcuuuggcaaacagggaaauucauuggcagucuucuugacaguuuuaugagggcugcagucaaugcugacaugugugcugaagucuucaaucagcugcauagcucccaucaaguuacaggguuggaacagggucugaaacuugggguuguacugauggugaagggcgauggagcuuugagcaaagguucccagcucuuuaagacauauccuggugcuacuggccuccggauugagauugggguugcagguggcaagaagguggauuugugucaagagcugaacaugcugcugcaucugcugcuggagucucuuccuuugugcuggguccagaaucagggucugaugaacuuccuuacacugggguuuaaccuucucuaccuccuucugcuguuuggcugaagguuucuucaucuucagcuguucaaauaguuccuucgcuaucugauguuguucauuuaguagguuggccaguaguuccucaaaccguagagcuugagggguguuaaaguuagcuugaggcucagccacacgcuccuccucuucugggccaucaucuuccauguuggagaaucccaucucaucuuggaaucguuuugaaggacaguguucauucuuuucauccgucaucuuuccacuuuuaagugcuuuccuugggugcuuaauaguuguuuuuauggcaggucgacauacauaguucuccaaguucuuuggagguuuuuuaguucucuuagccuggaggccaauuuucaauuuuaaauuucccucugaaaaguuuguuucuuucacugaaaacuguugcugugcaucagucaaaccaucaucuuucccagcuucgauguuucuuucucgauuccguuugcgaagguccucuuccuccuuuguguuuuuuucuagcucuacuucucucuuacugaccaaugugccaguacugauggcagaaggacucuuucuugaaaaaccuucggaaucagaacccaauccuaacauagcaguauuucuaggguccaucacaagcguauguuauugccaaggaaucuuaugaaaauuuuacagaacuguguuccauaaaaaacaaggaucuccaaaacucgaaaccagcaucuuucucgugucggaggccgaggccgaggccgagagcgaugagagugcagggaaguggggaagaggggguggccgccaggcuccuccgcuucccuggguccacggcggaucccucccgcuugucaggaggcggccagcggguaagcugacuggcggaaaugcgagagaggagaagggaaagguggaaggcuaaagggggcaaacugaggggaggcgggucccgcaaccgagacugggaucgucuccccuccgcaaagcgaacccaaaauggcggcgggagcggcggcggcggcggcggcagcagcagaguggcggcgguggcggcggcagcuccuccagagggagggagcgaagggcgccuagcgccccccucaaccuuccacuccu

SEQ ID NO: 2050 - RNA, 2489 nt, Homo sapiens
ucaaugaaacaaugaagcaauaaaagcacagauuuauugaagcaaaaguauauuccacagagugggagcaggcuaaagcaagcugcucaagagccccaguugcaaaaucugggguuuaaguacccuuuagggguuuccuauugguuacacccuaugcgccaccaaucggaggccgaagugaaggcucccagucuccagacucuuauucuccuagcucaaagaaauccacugauuuccucuguagcaucuucagguuccaucuugacaacuuccucuaaauccccaggggaagaguuguuuagagacuccuggaugcccugagggagcggcuccagagcuugccuucccuccucuguuuucacaacgguccagcgauaggcacuguucucugacaauccuucuuggcacuguuuaucgacugguggaggcccugggcuauguuccacuuuggggaaaacaguagcagagagaggagauaguuccuggggcucuaauuuggguucuaggcccugaaaggcauuuuccccaucagccacagcacaagcaauguccacauucaugugggccuuaucuucagggguggaugguauaggaagauucacagaauugccagaaacaauuaagggugagacagaggaggccacaaggggcugguucaauggacaggggaaggaaguaggguuaaccaagaggguggcgaugggaauagucuggggacucugggccacagccgcauugacaggcuggaucauguuacagccaccgccaaggcucacaaucuucacagugguagcaggaacagugaagauaacagaugcaggguggauaacaggggcagguuugauacagcgaaaggcccuggcuccccuucuuuuugagggucuccgucucacauauggcuuucgaaacauggaagaggcaggggagggcaucauuaccuugggcacaggggcagaagagagcaaagucugggacucagacagagggaagcuuguccuggccucagggggcauagcaggcagugcugcaggagacucaaaacucucaccuccacugacccccaguggagggacaccuggaacugucuguaaaacaguggcuggcuguauugggugaggaauccggagcaccauuuugcucggaggggcuucugaaugaguugauugggcugguguuuucccaggguugaagcugggcuggagagaggggcuggguuggauaaggagggguuucaggacugaugaacgcuucugucuccaagccuucuuggggaaacggucggcaacuggcuucaguuucaggacuacacccuuaggcaauagcaguggguaccgaguuucacuccccaacucugaguugucuuuuucuaggccuugaucugaguugaucucagugguuccagucauauuuccuaccucucuagcaccaucagccaugugccgcaguucuuccuggauggauggcagacuggccuuuaaccagaaugggagccgguguucuucucucucuauagguggcuuccacugauguggcuggaucucuucacagcauuuuccuaggacuggcagcuguuuggucuucuuauaaaaucguuuugaaggacaguguucauucuuuucauccgucaucuuuccacuuuuaagugcuuuccuugggugcuuaauaguuguuuuuauggcaggucgacauacauaguucuccaaguucuuuggagguuuuuuaguucucuuagccuggaggccaauuuucaauuuuaaauuucccucugaaaaguuuguuucuuucacugaaaacuguugcugugcaucagucaaaccaucaucuuucccagcuucgauguuucuuucucgauuccguuugcgaagguccucuuccuccuuuguguuuuuuucuagcucuacuucucucuuacugaccaaugugccaguacugauggcagaaggacucuuucuugaaaaaccuucggaaucagaacccaauccuaacauagcaguauuucuaggguccaucacaagcguauguuauugccaaggaaucuuaugaaaauuuuacagaacuguguuccauaaaaaacaaggaucuccaaaacucgaaaccagcaucuuucucgugucggaggccgaggccgaggccgagagcgaugagagugcagggaaguggggaagaggggguggccgccaggcuccuccgcuucccuggguccacggcggaucccucccgcuugucaggaggcggccagcggguaagcugacuggcggaaaugcgagagaggagaagggaaagguggaaggcuaaagggggcaaacugaggggaggcgggucccgcaaccgagacugggaucgucuccccuccgcaaagcgaacccaaaauggcggcgggagcggcggcggcggcggcggcagcagcagaguggcggcgguggcggcggcagcuccuccagagggagggagcgaagggcgccuagcgccccccucaaccuuccacuccu

SEQ ID NO: 2051 - RNA, 6814 nt, Homo sapiens
cacaguuaaacauuccuuuauucacccuauggcucccaagaaaagcauucuuccucuggaguacugguguacuaaggggacaauacaccaaauuuguugaguuuacaaucaagucuacuaagguuggacuuccuuaucaguuuggcgagucccagggcagaauaaucauccaucuacaggucucuguuuccucucccuccacagcaguggagagcaucccaguguuuggggcacuguguuccucuucgucccugcaccagacccuggaagccuuggccagagaccucaccaaacucgacuugcggcgcugggccagcuucauggaugcuggaguggagcacgaugacguagcagagcugcugcaggagcuacaaagccuggcccagugcuaccaggguggugacagccucguggacuaaaguucccagugugggagaaaggagcuaguuugcaauaaaaacagcuggaugcaggagcccagugucuucaugcagaggagcucaaugucgcgggacuagcuacaccaacauaugcacuuuuuacauuuagaaacacugugauuagaccacagaacaauaaauaugugccaucagaccaaaaaaaaguagagaaaggagcugaacuccacucucgaugcuauuuacagaggacaucuguaaagucuucauaaaagaccuugaaugaugccuaggauggcagagccccuggguccuacuccauccuccagccuuuguccuuguccuggccuccugcucuccagaucuguaaacugggcucaaggacuguacaagcagaguacaacuacccccuccccggugccagggcgccuguuggguuugguccuguguagaugauucccagagucucauucauccagcuccucuucagacagaagguccccauggucagacagcuggucugcauugcugguacugguugcaucauccucauccucagagcuggcuucacaggcaguguggaagagcugcaugaguucucgaaaacggugggaaaccucagcaggggucuuauuucccagcugcugggagaugauguugaaggucuguggcugugccccuugcuccuggcacauggugaggaucacacggucagcuucccuuguccacaggacaaccuuuuccccaguggagcugaccuugcuguuguuggcacacaccguagcuucugcggccuuuggcugcugcucccccucuggacccuuggccuguguuccacugucuuuagccaaacccccucuaggggcuuugggagaagucucugaggugucaauuccugauggagauucauggacagggcacguccugucucuugucuucacccgagcucugcuugagggcagccaucucucuugagugucugguuucccggacacaugucuucucccugcaucucuggucuuugaggaaacaggacucaggaaggaagcaggggguuccacgguaccaggcaauuucucaguuucugaugcaucccagaccagcaucaaagccucugacucacucacugccuuuuggcccucccucucuuucugaagucugggggaugccuuggggcaggagcgaaccucaggcccaaccugguuucucuuaacaguguacaguacagcuccaguuguggggggaaauugaggagucucuggugaaugagguggugggccauccaggaggagccguucuguaacagucacuucucgaggggauggcaaagugcuccccacugccaauccugaaacaggcaucucucccuuucuggugguccugacaguccugcucuggguggccucagugcucucccgcuccucuggggcuuccucuuccaucauauccuugcccugcccagcuuccuuagcaccaggcauaggacuagccucucggugggggcugcugcccaccaacucauggggcuccuugcucuuguaggauuugcugucacagaccuugcugcuacaguggcuacagcuccgccuuuugcucuucuucagcuuggaaucuggaccuccuucauggcaggagcaggcacaguccuuggccccaucuggccauucagucuccuuaucaugauuuuggaccccgaucucuuuuuuccucuuguucuuugaggcuguggguaucuugggaggcuccuccucuucuuccacaucaggcagggccacuucuucaaagccaucaaacucauacuccuuuuccucaguccaauugaucucuucaaagucacccauccggcuagcugcugggcgcaaguggucaaagaagauagaaaacucauccugcagguggucguggcccuugaggagcugccacaucugugucuugagcucggugaucuccuggggaaggcagucugcacagccuuggaggaccuugauaaucuucugguggugugagggguucucugcaaagcaaaucuccagcugccgaaggaacuugcggcucuucucaaaagccugcugcuccucaaauaauccacaggccagagcuugcucagguaacaggaaagcagcaaagucuuucaacagcugaggccagucuuggagcagaauuugcaggcuuuuguagagaucuacagccguccgucucuggguacuugacucaaauucauagaugacuugaaggaagucuucauacuugccagggauauguuguagggcuucucgcacccuggucagauaagcuugggcaaaggccaaguccuucugcucccugaguggaucucgcucgagaauguccucaucauacagcaacagcagcuuggagguguccuugcuggcccgagcccgacuuccccgcuuguugcgagcucgaugauuguuccggccuuuuccagcagcuuugaugcucucuccugguggaguucugcuggucuccacuucuggagcagucucaggugaagcaaaaguaggaggcuucucagcagagucuccaacugcuucauccgucauuucauccucuuucugcaggcuuuccauuccuucugcuucuucuuccuccucuucuucuggcucagaguucuccuccugagaauucucuucuucagacucacccuccugacucaugcgccuuucagaugccagccaagucaguuucuccauuguuuccuggaguucugggacagaaagcacagauuccucagaagcugaugacauuucaucuuccucaucuugggugaggucaucaaaguccucuucuuccucuucuucuggcccauucuucucuccuccaguuucuggcccaacuggaguccccacugacugaccaucaacacuggaugaaucuucuggcuucccuggggggcuacuaagccucacuucaggauccauugaggacaaagcauucuuugaugauccuuuguucacaucugucccugagguuccuucaucagggggcucuugagaagaugaagggguuuuaguuggcugacuccucuccucuuccuucuguaagacugucuguuucguuacuucuccagcacugcucaacuccucgcuuggggcaccaguguccaauuccacagcauguuccacuuugaugucaucacaaauaucacgcucaggggauccacugauuuccucucuagcuucuucagguuccaucuugacaauuuccucuaaauccccagggguaggguuguuuagagacuccuggaugcccugagggagcggcuccagagcuugccuccccuccucuguuuucacaacgguccagcgacaggcacuauucucugacaauccuucuuggcacucugcaucugcuaguggaggcccugggcuauguuccacuuucgggaaaacaguagcagagagaggagauaguuccuggggcucuaauuuggguucuaggcccugaaaggcauuuuccccaucagccacagcacaagcaauguccacauucacgugggccuuaucuucagggguggaugguauaggaagauucacagaauugccagaaacaauuaagggugagacagaggaggccacaagggacugguucaauggacaggggaaggaaguaggguuaaccaagaggguagugaugggaauagucuggggacucugggccacagccgcauugacaggcuggaucauguuacagccaccgccaaggcucacaaucuucacagugguagcaggaacagugaagauaacagaugcagggugguggauaacaggggcagguuucauacagggagaggccuugacuccucuucucuuugagggucuccgucucacauauggcuuucgaaacuuagaaggggcaagggagggcagcauuaccuugggcacaggggcagaagagagcaaagucugggacucagacagagggaagcuuguccuggccucagggggcacagcaggcagugcugcaggagacucaaaacucucaccuccacugacccccaguggagggacaccuggaacugucuguaaaacaguggcuggcuguauugggugaggaauccggagcaccauuuugcucggaggggcuucugaaugaguugaucgggcugguguuuucccaggguugaagcugggcuggagagaggggcuggguuggauaaggaggggcuucaggacugaugaacgcuucugucuccaagccuuccuggggaaacggguggcaacuggcuucaguuucaggacuacacccuuaggcaauagcaguggguaccgagauucacuccccaacuccaaauugucuuuuucuaggcuucgaucugaguugaucucagugguuccagucauauuuccuaccucucuagcaccaucagccaugugccgcaguucuuccuggauggauggcagacuggccuuuaaccagaaugggagccgguguucuucucucucuauagguggcuuccacugauguggcuggaucucuucacagcauuuuccuaggacuggcagcuguuuggucuucuuauaaaauuuaaugauguugucaggagcucuguucauguugagguucuugauucucacugucaguuggugggcaguuuugcagguuagaagguacuugcugauuagaggauuaggaaacucaguuccuucaaaaugcuucaguccuaaagcuaacaaauuguccucagccuuggugaagacgaucuuauccuggggauucuuugccuucagggaacacacuggaaguaacucuggauacaugaaaaccuugcuuguggccagaauccaagccacuugcuuuggcaaacagggaaauucauucgcagucuucuugacaguuuuaugagggcugcagucaaugcugacaugugugcugaagucuucaaucagcugcauagcucccaucaaguuacaggguuggaacagggucugaaacuugggguuguacugauggugaagggcgauggagcuuugagcaaagguucccagcucuuuaagaaauauccuggugguaguggccuccggauugagguugggguugcagguggcaagaagguggauuugggucaagagcugaacgugcugcugcaucugcugcuggagucucuuccucugugcuggguccagaaucagagucugaugaacuuucucacucugggguuuaaccuucucuacuuccugcagcuguuuggcugaagauuucuucaucuucagcuguucaaauagcuccuucacuguccgauguuguucauuuaacagguuggccagugguuccucaaaccguagagcuugagggguguuaaaguuaggacgaggcucagcuacacacuccuccucuucugggccaucaucuuccauguuggagaaucccaucucaucuuggaaaguuucaaacagcucuuccaucagcucauuuacuuccuuuuuggugauucucacugcccggucaguccggaaauccucugugucugguucaucgaggucuuccaggaaauuauauucuggaucaucaucaucaucugcuucaucuucauuccccacaucaucauucauaaguccccccagccacaucuuccaguccucaucaucugccguauuggggucauacauaucuggagugaugucuggagcuuggagcucugccucuaauuggcccaggggaacaucuuucaggggcaucuuagaacgcguucgaaaugcaaugagacugucauccaugggucguuuugaaggacaguguucauucuuuucauccgucaucuuuccacuuuuaagugcuuuccuugggugcuuaauaguuguuuuuauggcaggucgacauacauaguucuccaaguucuuuggagguuuuuuaguucucuuagccuggaggccaauuuucaauuuuaaauuucccucugaaaaguuuguuucuuucacugaaaacuguugcugugcaucagucaaaccaucaucuuucccagcuucgauguuucuuucucgauuccguuugcgaagguccucuuccuccuuuguguuuuuuucuagcucuacuucucucuuacugaccaaugugccaguacugauggcagaaggacucuuucuugaaaaaccuucggaaucagaacccaauccuaacauagcaguauuucuaggguccaucacaagcguauguuauugccaaggaaucuuaugaaaauuuuacagaacuguguuccauaaaaaacaaggaucuccaaaacucgaaaccagcaucuuucucgugucggaggccgaggccgaggccgagagcgaugagagugcagggaaguggggaagaggggguggccgccaggcuccuccgcuucccuggguccacggcggaucccucccgcuugucaggaggcggccagcggguaagcugacuucaacggcgcaagc

SEQ ID NO: 2052 - skipped

SEQ ID NO: 2053 - RNA, 2176 nt, Homo sapiens
uugagacagagucuugcagucuugcucuauugcccaggcuggagugcaguggcacaaucugggcuuacugcaaccuccgccucccagguucaagcaauuuuccugccucagccucugcaguaaccgugacuacaggugcccgccaccaugccuaauuuuuguauuuuuaauagagacaggguuucaucauguuggccaggcuggucucaaacuccugaccucagaugauccaccugccguggccucccaaagugcugggauuacaagcgugagccacugcacccagccucaaaaugaucaaucucuuaaaaugaaaaaucuuuugaaacaaauuuaugaaaaagguaauuauuuguacacaaaguaguuuaaaacuaguugacaaucuuuaaggacacaccaaaugacaguaggggaagucaucaaaaguuuuccaggggccaggcaugcuggcucacaccuauaauuccagcacugggaggcccaaggcaggaaaauugcuugagcccagaaguuccagaacaaccugagcaaugugguaagacccugucucuacaaauaaaauaauuagcuggguguguugguaugucccagcuacucaggaggcuuagacgaaggacugcuugagccuagaaggucaaggcugcugugagcuguaauuucaccacugcacucuggcuugggugauggagcaagaacccccucaaacaaaaagaaguuucaaggaaaauguuaauaagaacaacauacauguauauaaucaagagucuaguaguuagcaaaauucccuugucauuauauucuuucccagguagacuaaaaggagaauugguucagucagacccccucuccuagagggagcaucacagagaccaaaugacacaucuugcuggagaacugacuuaaaaucccguguucucacucgaggaucauuacucacaguuucaaacagcucuuccaucagcucauuuacuuccuuuuuggugauucucacugcccggucaguccggaaauccucugugucugguucaucgaggucuuccaggaaauuauauucuggaucaucaucaucaucugcuucaucuucauuccccacaucaucauucauaaguccccccagccacaucuuccaguccucaucaucugccguauuggggucauacauaucuggagugaugucuggagcuuggagcucugccucuaauuggcccaggggaacaucuuucaggggcaucuuagaacgcguucgaaaugcaaugagacugucauccaugggucguuuugaaggacaguguucauucuuuucauccgucaucuuuccacuuuuaagugcuuuccuugggugcuuaauaguuguuuuuauggcaggucgacauacauaguucuccaaguucuuuggagguuuuuuaguucucuuagccuggaggccaauuuucaauuuuaaauuucccucugaaaaguuuguuucuuucacugaaaacuguugcugugcaucagucaaaccaucaucuuucccagcuucgauguuucuuucucgauuccguuugcgaagguccucuuccuccuuuguguuuuuuucuagcucuacuucucucuuacugaccaaugugccaguacugauggcagaaggacucuuucuugaaaaaccuucggaaucagaacccaauccuaacauagcaguauuucuaggguccaucacaagcguauguuauugccaaggaaucuuaugaaaauuuuacagaacuguguuccauaaaaaacaaggaucuccaaaacucgaaaccagcaucuuucucgugucggaggccgaggccgaggccgagagcgaugagagugcagggaaguggggaagaggggguggccgccaggcuccuccgcuucccuggguccacggcggaucccucccgcuugucaggaggcggccagcggguaagcugacuggcggaaaugcgagagaggagaagggaaagguggaaggcuaaagggggcaaacugaggggaggcgggucccgcaaccgagacugggaucgucuccccuccgcaaagcgaacccaaaauggcggcgggagcggcggcggcggcggcggcagcagcagaguggcggcgguggcggcggcagcuccuccagagggagggagcgaagggcgccuagcgccccccucaaccuuccacuccu

SEQ ID NO: 2054 - RNA, 3347 nt, Homo sapiens
ucaaugaaacaaugaagcaauaaaagcacagauuuauugaagcaaaaguauauuccacagagugggagcaggcuaaagcaagcugcucaagagccccaguugcaaaaucugggguuuaaguacccuuuagggguuuccuauugguuacacccuaugcgccaccaaucggaggccgaagugaaggcucccagucuccagacucuuauucuccuagcucaaagaaauccacugauuuccucuguagcaucuucagguuccaucuugacaacuuccucuaaauccccaggggaagaguuguuuagagacuccuggaugcccugagggagcggcuccagagcuugccuucccuccucuguuuucacaacgguccagcgauaggcacuguucucugacaauccuucuuggcacuguuuaucgacugguggaggcccugggcuauguuccacuuuggggaaaacaguagcagagagaggagauaguuccuggggcucuaauuuggguucuaggcccugaaaggcauuuuccccaucagccacagcacaagcaauguccacauucaugugggccuuaucuucagggguggaugguauaggaagauucacagaauugccagaaacaauuaagggugagacagaggaggccacaaggggcugguucaauggacaggggaaggaaguaggguuaaccaagaggguggcgaugggaauagucuggggacucugggccacagccgcauugacaggcuggaucauguuacagccaccgccaaggcucacaaucuucacagugguagcaggaacagugaagauaacagaugcaggguggauaacaggggcagguuugauacagcgaaaggcccuggcuccccuucuuuuugagggucuccgucucacauauggcuuucgaaacauggaagaggcaggggagggcaucauuaccuugggcacaggggcagaagagagcaaagucugggacucagacagagggaagcuuguccuggccucagggggcauagcaggcagugcugcaggagacucaaaacucucaccuccacugacccccaguggagggacaccuggaacugucuguaaaacaguggcuggcuguauugggugaggaauccggagcaccauuuugcucggaggggcuucugaaugaguugauugggcugguguuuucccaggguugaagcugggcuggagagaggggcuggguuggauaaggagggguuucaggacugaugaacgcuucugucuccaagccuucuuggggaaacggucggcaacuggcuucaguuucaggacuacacccuuaggcaauagcaguggguaccgaguuucacuccccaacucugaguugucuuuuucuaggccuugaucugaguugaucucagugguuccagucauauuuccuaccucucuagcaccaucagccaugugccgcaguucuuccuggauggauggcagacuggccuuuaaccagaaugggagccgguguucuucucucucuauagguggcuuccacugauguggcuggaucucuucacagcauuuuccuaggacuggcagcuguuuggucuucuuauaaaauuuaaugauguugucaggagcucuguucauguugagguucuugauucucacugucaguuggcgggcagucuugcagguuagaagguacuugcugauuagaggguuaagaaacucagucccuucaaaaugcuucaguccuaaagcuaacaaauuguccucagccuuggugaagaggaucuuauccuggggauucuuugccuucagggaacacacuggaaguaacucuggauacaugaaaaccuugcuuguggccaggauccaagccacuugcuuuggcaaacagggaaauucauuggcagucuucuugacaguuuuaugagggcugcagucaaugcugacaugugugcugaagucuucaaucagcugcauagcucccaucaaguuacaggguuggaacagggucugaaacuugggguuguacugauggugaagggcgauggagcuuugagcaaagguucccagcucuuuaagacauauccuggugcuacuggccuccggauugagauugggguugcagguggcaagaagguggauuugugucaagagcugaacaugcugcugcaucugcugcuggagucucuuccuuugugcuggguccagaaucagggucugaugaacuuccuuacacugggguuuaaccuucucuaccuccuucugcuguuuggcugaagguuucuucaucuucagcuguucaaauaguuccuucgcuaucugauguuguucauuuaguagguuggccaguaguuccucaaaccguagagcuugagggguguuaaaguuagcuugaggcucagccacacgcuccuccucuucugggccaucaucuuccauguuggagaaucccaucucaucuuggaaucguuuugaaggacaguguucauucuuuucauccgucaucuuuccacuuuuaagugcuuuccuugggugcuuaauaguuguuuuuauggcaggucgacauacauaguucuccaaguucuuuggagguuuuuuaguucucuuagccuggaggccaauuuucaauuuuaaauuucccucugaaaaguuuguuucuuucacugaaaacuguugcugugcaucagucaaaccaucaucuuucccagcuucgauguuucuuucucgauuccguuugcgaagguccucuuccuccuuuguguuuuuuucuagcucuacuucucucuuacugaccaaugugccaguacugauggcagaaggacucuuucuugaaaaaccuucggaaucagaacccaauccuaacauagcaguauuucuaggguccaucacaagcguauguuauugccaaggaaucuuaugaaaauuuuacagaacuguguuccauaaaaaacaaggaucuccaaaacucgaaaccagcaucuuucucgugucggaggccgaggccgaggccgagagcgaugagagugcagggaaguggggaagaggggguggccgccaggcuccuccgcuucccuggguccacggcggaucccucccgcuugucaggaggcggccagcggguaagcugacuggcggaaaugcgagagaggagaagggaaagguggaaggcuaaagggggcaaacugaggggaggcgggucccgcaaccgagacugggaucgucuccccuccgcaaagcgaacccaaaauggcggcgggagcggcggcggcggcggcggcagcagcagaguggcggcgguggcggcggcagcuccuccagagggagggagcgaagggcgccuagcgccccccucaaccuuccacuccu

SEQ ID NO: 2055 - RNA, 2509 nt, Homo sapiens
ucaaugaaacaaugaagcaauaaaagcacagauuuauugaagcaaaaguauauuccacagagugggagcaggcuaaagcaagcugcucaagagccccaguugcaaaaucugggguuuaaguacccuuuagggguuuccuauugguuacacccuaugcgccaccaaucggaggccgaagugaaggcucccagucuccagacucuuauucuccuagcucaaagaaauccacugauuuccucuguagcaucuucagguuccaucuugacaacuuccucuaaauccccaggggaagaguuguuuagagacuccuggaugcccugagggagcggcuccagagcuugccuucccuccucuguuuucacaacgguccagcgauaggcacuguucucugacaauccuucuuggcacuguuuaucgacugguggaggcccugggcuauguuccacuuuggggaaaacaguagcagagagaggagauaguuccuggggcucuaauuuggguucuaggcccugaaaggcauuuuccccaucagccacagcacaagcaauguccacauucaugugggccuuaucuucagggguggaugguauaggaagauucacagaauugccagaaacaauuaagggugagacagaggaggccacaaggggcugguucaauggacaggggaaggaaguaggguuaaccaagaggguggcgaugggaauagucuggggacucugggccacagccgcauugacaggcuggaucauguuacagccaccgccaaggcucacaaucuucacagugguagcaggaacagugaagauaacagaugcaggguggauaacaggggcagguuugauacagcgaaaggcccuggcuccccuucuuuuugagggucuccgucucacauauggcuuucgaaacauggaagaggcaggggagggcaucauuaccuugggcacaggggcagaagagagcaaagucugggacucagacagagggaagcuuguccuggccucagggggcauagcaggcagugcugcaggagacucaaaacucucaccuccacugacccccaguggagggacaccuggaacugucuguaaaacaguggcuggcuguauugggugaggaauccggagcaccauuuugcucggaggggcuucugaaugaguugauugggcugguguuuucccaggguugaagcugggcuggagagaggggcuggguuggauaaggagggguuucaggacugaugaacgcuucugucuccaagccuucuuggggaaacggucggcaacuggcuucaguuucaggacuacacccuuaggcaauagcaguggguaccgaguuucacuccccaacucugaguugucuuuuucuaggccuugaucugaguugaucucagugguuccagucauauuuccuaccucucuagcaccaucagccaugugccgcaguucuuccuggauggauggcagacuggccuauuggaaaugagaacacucuuuaaccagaaugggagccgguguucuucucucucuauagguggcuuccacugauguggcuggaucucuucacagcauuuuccuaggacuggcagcuguuuggucuucuuauaaaaucguuuugaaggacaguguucauucuuuucauccgucaucuuuccacuuuuaagugcuuuccuugggugcuuaauaguuguuuuuauggcaggucgacauacauaguucuccaaguucuuuggagguuuuuuaguucucuuagccuggaggccaauuuucaauuuuaaauuucccucugaaaaguuuguuucuuucacugaaaacuguugcugugcaucagucaaaccaucaucuuucccagcuucgauguuucuuucucgauuccguuugcgaagguccucuuccuccuuuguguuuuuuucuagcucuacuucucucuuacugaccaaugugccaguacugauggcagaaggacucuuucuugaaaaaccuucggaaucagaacccaauccuaacauagcaguauuucuaggguccaucacaagcguauguuauugccaaggaaucuuaugaaaauuuuacagaacuguguuccauaaaaaacaaggaucuccaaaacucgaaaccagcaucuuucucgugucggaggccgaggccgaggccgagagcgaugagagugcagggaaguggggaagaggggguggccgccaggcuccuccgcuucccuggguccacggcggaucccucccgcuugucaggaggcggccagcggguaagcugacuggcggaaaugcgagagaggagaagggaaagguggaaggcuaaagggggcaaacugaggggaggcgggucccgcaaccgagacugggaucgucuccccuccgcaaagcgaacccaaaauggcggcgggagcggcggcggcggcggcggcagcagcagaguggcggcgguggcggcggcagcuccuccagagggagggagcgaagggcgccuagcgccccccucaaccuuccacuccu

SEQ ID NO: 2056-2057 - skipped (2 entries)

SEQ ID NO: 2058 - RNA, 1965 nt, Homo sapiens
agacaagcucaaggcaucuuuccaagggacucugcauaugaaauuucuacaaagaccacaguccaauuauacacuuuagaaacucuucucugaauuuccuuuagcaaauuaccauuuuacccauuauuuugaaaauguuguagaaucacccggagaagggcagaaaaguaagggaagaaaggugaaucaggaagauuccugaaguccuaguucuacaacuaaagcauuagacgauuaaggaaguccuugauauucucucagaacuuucagugaccuucugccuccuacagacuucgaggaagagggcuguaccuuuaaccagaaugggagccgguguucuucucucucuauagguggcuuccacugauguggcuggaucucuucacagcauuuuccuaggacuggcagcuguuuggucuucuuauaaaauuuaaugauguugucaggagcucuguucauguugagguucuugauucucacugucaguuggcgggcagucuugcagguuagaagguacuugcugauuagaggguuaagaaacucagucccuucaaaaugcuucaguccuaaagcuaacaaauuguccucagccuuggugaagaggaucuuauccuggggauucuuugccuucagggaacacacuggaaguaacucuggauacaugaaaaccuugcuuguggccaggauccaagccacuugcuuuggcaaacagggaaauucauuggcagucuucuugacaguuuuaugagggcugcagucaaugcugacaugugugcugaagucuucaaucagcugcauagcucccaucaaguuacaggguuggaacagggucugaaacuugggguuguacugauggugaagggcgauggagcuuugagcaaagguucccagcucuuuaagacauauccuggugcuacuggccuccggauugagauugggguugcagguggcaagaagguggauuugugucaagagcugaacaugcugcugcaucugcugcuggagucucuuccuuugugcuggguccagaaucagggucugaugaacuuccuuacacugggguuuaaccuucucuaccuccuucugcuguuuggcugaagguuucuucaucuucagcuguucaaauaguuccuucgcuaucugauguuguucauuuaguagguuggccaguaguuccucaaaccguagagcuugagggguguuaaaguuagcuugaggcucagccacacgcuccuccucuucugggccaucaucuuccauguuggagaaucccaucucaucuuggaaucguuuugaaggacaguguucauucuuuucauccgucaucuuuccacuuuuaagugcuuuccuugggugcuuaauaguuguuuuuauggcaggucgacauacauaguucuccaaguucuuuggagguuuuuuaguucucuuagccuggaggccaauuuucaauuuuaaauuucccucugaaaaguuuguuucuuucacugaaaacuguugcugugcaucagucaaaccaucaucuuucccagcuucgauguuucuuucucgauuccguuugcgaagguccucuuccuccuuuguguuuuuuucuagcucuacuucucucuuacugaccaaugugccaguacugauggcagaaggacucuuucuugaaaaaccuucggaaucagaacccaauccuaacauagcaguauuucuaggguccaucacaagcguauguuauugccaaggaaucuuaugaaaauuuuacagaacuguguuccauaaaaaacaaggaucuccaaaacucgaaaccagcaucuuucucgugucggaggccgaggccgaggccgagagcgaugagagugcagggaaguggggaagaggggguggccgccaggcuccuccgcuucccuggguccacggcggaucccucccgcuugucaggaggcggccagcggguaagcugacuucaacggcgcaagc

SEQ ID NO: 2059 - skipped

SEQ ID NO: 2060 - RNA, 7039 nt, Homo sapiens
cacaguuaaacauuccuuuauucacccuauggcucccaagaaaagcauucuuccucuggaguacugguguacuaaggggacaauacaccaaauuuguugaguuuacaaucaagucuacuaagguuggacuuccuuaucaguuuggcgagucccagggcagaauaaucauccaucuacaggucucuguuuccucucccuccacagcaguggagagcaucccaguguuuggggcacuguguuccucuucgucccugcaccagacccuggaagccuuggccagagaccucaccaaacucgacuugcggcgcugggccagcuucauggaugcuggaguggagcacgaugacguagcagagcugcugcaggagcuacaaagccuggcccagugcuaccaggguggugacagccucguggacuaaaguucccagugugggagaaaggagcuaguuugcaauaaaaacagcuggaugcaggagcccagugucuucaugcagaggagcucaaugucgcgggacuagcuacaccaacauaugcacuuuuuacauuuagaaacacugugauuagaccacagaacaauaaauaugugccaucagaccaaaaaaaaguagagaaaggagcugaacuccacucucgaugcuauuuacagaggacaucuguaaagucuucauaaaagaccuugaaugaugccuaggauggcagagccccuggguccuacuccauccuccagccuuuguccuuguccuggccuccugcucuccagaucuguaaacugggcucaaggacuguacaagcagaguacaacuacccccuccccggugccagggcgccuguuggguuugguccuguguagaugauucccagagucucauucauccagcuccucuucagacagaagguccccauggucagacagcuggucugcauugcugguacugguugcaucauccucauccucagagcuggcuucacaggcaguguggaagagcugcaugaguucucgaaaacggugggaaaccucagcaggggucuuauuucccagcugcugggagaugauguugaaggucuguggcugugccccuugcuccuggcacauggugaggaucacacggucagcuucccuuguccacaggacaaccuuuuccccaguggagcugaccuugcuguuguuggcacacaccguagcuucugcggccuuuggcugcugcucccccucuggacccuuggccuguguuccacugucuuuagccaaacccccucuaggggcuuugggagaagucucugaggugucaauuccugauggagauucauggacagggcacguccugucucuugucuucacccgagcucugcuugagggcagccaucucucuugagugucugguuucccggacacaugucuucucccugcaucucuggucuuugaggaaacaggacucaggaaggaagcaggggguuccacgguaccaggcaauuucucaguuucugaugcaucccagaccagcaucaaagccucugacucacucacugccuuuuggcccucccucucuuucugaagucugggggaugccuuggggcaggagcgaaccucaggcccaaccugguuucucuuaacaguguacaguacagcuccaguuguggggggaaauugaggagucucuggugaaugagguggugggccauccaggaggagccguucuguaacagucacuucucgaggggauggcaaagugcuccccacugccaauccugcugaaacaggcaucucucccuuucuggugguccugacaguccugcucuggguggccucagugcucucccgcuccucuggggcuuccucuuccaucauauccuugcccugcccagcuuccuuagcaccaggcauaggacuagccucucggugggggcugcugcccaccaacucauggggcuccuugcucuuguaggauuugcugucacagaccuugcugcuacaguggcuacagcuccgccuuuugcucuucuucagcuuggaaucuggaccuccuucauggcaggagcaggcacaguccuuggccccaucuggccauucagucuccuuaucaugauuuuggaccccgaucucuuuuuuccucuuguucuuugaggcuguggguaucuugggaggcuccuccucuucuuccacaucaggcagggccacuucuucaaagccaucaaacucauacuccuuuuccucaguccaauugaucucuucaaagucacccauccggcuagcugcugggcgcaaguggucaaagaagauagaaaacucauccugcagguggucguggcccuugaggagcugccacaucugugucuugagcucggugaucuccuggggaaggcagucugcacagccuuggaggaccuugauaaucuucugguggugugagggguucucugcaaagcaaaucuccagcugccgaaggaacuugcggcucuucucaaaagccugcugcuccucaaauaauccacaggccagagcuugcucagguaacaggaaagcagcaaagucuuucaacagcugaggccagucuuggagcagaauuugcaggcuuuuguagagaucuacagccguccgucucuggguacuugacucaaauucauagaugacuugaaggaagucuucauacuugccagggauauguuguagggcuucucgcacccuggucagauaagcuugggcaaaggccaaguccuucugcucccugaguggaucucgcucgagaauguccucaucauacagcaacagcagcuuggagguguccuugcuggcccgagcccgacuuccccgcuuguugcgagcucgaugauuguuccggccuuuuccagcagcuuugaugcucucuccugguggaguucugcuggucuccacuucuggagcagucucaggugaagcaaaaguaggaggcuucucagcagagucuccaacugcuucauccgucauuucauccucuuucugcaggcuuuccauuccuucugcuucuucuuccuccucuucuucuggcucagaguucuccuccugagaauucucuucuucagacucacccuccugacucaugcgccuuucagaugccagccaagucaguuucuccauuguuuccuggaguucugggacagaaagcacagauuccucagaagcugaugacauuucaucuuccucaucuugggugaggucaucaaaguccucuucuuccucuucuucuggcccauucuucucuccuccaguuucuggcccaacuggaguccccacugacugaccaucaacacuggaugaaucuucuggcuucccuggggggcuacuaagccucacuucaggauccauugaggacaaagcauucuuugaugauccuuuguucacaucugucccugagguuccuucaucagggggcucuugagaagaugaagggguuuuaguuggcugacuccucuccucuuccuucuguaagacugucuguuucguuacuucuccagcacugcucaacuccucgcuuggggcaccaguguccaauuccacagcauguuccacuuugaugucaucacaaauaucacgcucaggggauccacugauuuccucucuagcuucuucagguuccaucuugacaauuuccucuaaauccccagggguaggguuguuuagagacuccuggaugcccugagggagcggcuccagagcuugccuccccuccucuguuuucacaacgguccagcgacaggcacuauucucugacaauccuucuuggcacucugcaucugcuaguggaggcccugggcuauguuccacuuucgggaaaacaguagcagagagaggagauaguuccuggggcucuaauuuggguucuaggcccugaaaggcauuuuccccaucagccacagcacaagcaauguccacauucacgugggccuuaucuucagggguggaugguauaggaagauucacagaauugccagaaacaauuaagggugagacagaggaggccacaagggacugguucaauggacaggggaaggaaguaggguuaaccaagaggguagugaugggaauagucuggggacucugggccacagccgcauugacaggcuggaucauguuacagccaccgccaaggcucacaaucuucacagugguagcaggaacagugaagauaacagaugcagggugguggauaacaggggcagguuucauacagggagaggccuugacuccucuucucuuugagggucuccgucucacauauggcuuucgaaacuuagaaggggcaagggagggcagcauuaccuugggcacaggggcagaagagagcaaagucugggacucagacagagggaagcuuguccuggccucagggggcacagcaggcagugcugcaggagacucaaaacucucaccuccacugacccccaguggagggacaccuggaacugucuguaaaacaguggcuggcuguauugggugaggaauccggagcaccauuuugcucggaggggcuucugaaugaguugaucgggcugguguuuucccaggguugaagcugggcuggagagaggggcuggguuggauaaggaggggcuucaggacugaugaacgcuucugucuccaagccuuccuggggaaacggguggcaacuggcuucaguuucaggacuacacccuuaggcaauagcaguggguaccgagauucacuccccaacuccaaauugucuuuuucuaggcuucgaucugaguugaucucagugguuccagucauauuuccuaccucucuagcaccaucagccaugugccgcaguucuuccuggauggauggcagacuggccuuuaaccagaaugggagccgguguucuucucucucuauagguggcuuccacugauguggcuggaucucuucacagcauuuuccuaggacuggcagcuguuuggucuucuuauaaaauuuaaugauguugucaggagcucuguucauguugagguucuugauucucacugucaguuggugggcaguuuugcagguuagaagguacuugcugauuagaggauuaggaaacucaguuccuucaaaaugcuucaguccuaaagcuaacaaauuguccucagccuuggugaagacgaucuuauccuggggauucuuugccuucagggaacacacuggaaguaacucuggauacaugaaaaccuugcuuguggccagaauccaagccacuugcuuuggcaaacagggaaauucauucgcagucuucuugacaguuuuaugagggcugcagucaaugcugacaugugugcugaagucuucaaucagcugcauagcucccaucaaguuacaggguuggaacagggucugaaacuugggguuguacugauggugaagggcgauggagcuuugagcaaagguucccagcucuuuaagaaauauccuggugguaguggccuccggauugagguugggguugcagguggcaagaagguggauuugggucaagagcugaacgugcugcugcaucugcugcuggagucucuuccucugugcuggguccagaaucagagucugaugaacuuucucacucugggguuuaaccuucucuacuuccugcagcuguuuggcugaagauuucuucaucuucagcuguucaaauagcuccuucacuguccgauguuguucauuuaacagguuggccagugguuccucaaaccguagagcuugagggguguuaaaguuaggacgaggcucagcuacacacuccuccucuucugggccaucaucuuccauguuggagaaucccaucucaucuuggaaaguuucaaacagcucuuccaucagcucauuuacuuccuuuuuggugauucucacugcccggucaguccggaaauccucugugucugguucaucgaggucuuccaggaaauuauauucuggaucaucaucaucaucugcuucaucuucauuccccacaucaucauucauaaguccccccagccacaucuuccaguccucaucaucugccguauuggggucauacauaucuggagugaugucuggagcuuggagcucugccucuaauuggcccaggggaacaucuuucaggggcaucuuagaacgcguucgaaaugcaaugagacugucauccaugggucguuuugaaggacaguguucauucuuuucauccgucaucuuuccacuuuuaagugcuuuccuugggugcuuaauaguuguuuuuauggcaggucgacauacauaguucuccaaguucuuuggagguuuuuuaguucucuuagccuggaggccaauuuucaauuuuaaauuucccucugaaaaguuuguuucuuucacugaaaacuguugcugugcaucagucaaaccaucaucuuucccagcuucgauguuucuuucucgauuccguuugcgaagguccucuuccuccuuuguguuuuuuucuagcucuacuucucucuuacugaccaaugugccaguacugauggcagaaggacucuuucuugaaaaaccuucggaaucagaacccaauccuaacauagcaguauuucuaggguccaucacaagcguauguuauugccaaggaaucuuaugaaaauuuuacagaacuguguuccauaaaaaacaaggaucuccaaaacucgaaaccagcaucuuucucgugucggaggccgaggccgaggccgagagcgaugagagugcagggaaguggggaagaggggguggccgccaggcuccuccgcuucccuggguccacggcggaucccucccgcuugucaggaggcggccagcggguaagcugacuggcggaaaugcgagagaggagaagggaaagguggaaggcuaaagggggcaaacugaggggaggcgggucccgcaaccgagacugggaucgucuccccuccgcaaagcgaacccaaaauggcggcgggagcggcggcggcggcggcggcagcagcagaguggcggcgguggcggcggcagcuccuccagagggagggagcgaagggcgccuagcgccccccucaaccuuccacuccu

SEQ ID NO: 2061 - RNA, 1601 nt, Homo sapiens
cauuguauaauuuaaaagcuuuauuuccccccauaauuugcaaauagauuucauauuaguuccacuggaaguuuucuucguacaguugccuuucucauugacuaugcuguugguggggaaaacugcuuucucaugaggggaaggguuagauuucauagagaugcucugagcuaaucacauaaacaagaggguuugaccuggcagccucugaggcagucaaggaggucaagaaauccuuucagcuaaaggccuagucaggugggacuaguugccaggauccucucugcagaacugcccaaacguagcucucuuugaccaggaagccuggaagucagaccaucuucucaggcccugccaaauucccauccucaguccuguggccucaugcgggaacauuuuauccaagcaaaccacuggcuuucgccuugagguccaaugugcacucuucaccaagugcaagauugaucuucacuccaaaguucaccguucacacaguuuuuggcuugugcuuuagaggcuggucucugccucuccuaggaaugguggcaucacagcaauggaagcacaaagacccaggcaagcacugguagguagagugugggggcacugcugccagauguucucugagcgugcauuacggcaaacacugcauuagugugauugguggguaauucuacauugcagaucauuccuucacagcaagaccuacacuccguauguucagaaucucggcugugguggcaaccgacaaaaugacauucacuucuggaggcacacuuuuuggugauggaugugcuucuuccguggcuggugaagugaugaacugucaaacaguacuguguauuuuguggacaccauuugucuucugcccaucgauugcaguuauaauuauccccugcguuuucacaaguaaagcacuugaagcuauuuggaaaugguguagggucgagaggaggccucacauuauagaaguugauguucuuggcaaaugcccagcuuucugagaagauaacgaucuggacaacagcuauagcgagagcgugacagaggagcagcaugcugaccuugugugcugggcgguccgaacucuuauaucucgagggcaguagaugucuggagcccaucgguugcacucauaauugucugcugccuuuucacaggugaaacauuuaaauccaccaggauauggugugguugaaggauggagguagauaaugucuuucacugugaagucucgggacugagcagcuuucagacaauccgccagcaggcucaggagcaggagccaggccagagcagggccagguuccauggcagacugaagugucacucauacagagggccugggagugggcacucagggcaacaggagagaacuugcaccuuccugugcgcgacccccuggcgccucucccuagccgccagccucagccgggccagcagcugcgugcguggcugcaggcccggcagugugaaaugacccuggccaaaucucacuccccgccauccccugggccccgcgaaauccgccggaccgcagagcucaagagcaagugaagcuccgaacccagggaaggcggagaccacuugacguuugcagu

SEQ ID NO: 2062 - RNA, 1848 nt, Homo sapiens
cauuguauaauuuaaaagcuuuauuuccccccauaauuugcaaauagauuucauauuaguuccacuggaaguuuucuucguacaguugccuuucucauugacuaugcuguugguggggaaaacugcuuucucaugaggggaaggguuagauuucauagagaugcucugagcuaaucacauaaacaagaggguuugaccuggcagccucugaggcagucaaggaggucaagaaauccuuucagcuaaaggccuagucaggugggacuaguugccaggauccucucugcagaacugcccaaacguagcucucuuugaccaggaagccuggaagucagaccaucuucucaggcccugccaaauucccauccucaguccuguggccucaugcgggaacauuuuauccaagcaaaccacuggcuuucgccuugagguccaaugugcacucuucaccaagugcaagauugaucuucacuccaaaguucaccguucacacaguuuuuggcuugugcuuuagaggcuggucucugccucuccuaggaaugguggcaucacagcaauggaagcacaaagacccaggcaagcacugguagguagagugugggggcacugcugccagauguucucugagcgugcauuacggcaaacacugcauuagugugauugguggguaauucuacauugcagaucauuccuucacagcaagaccuacacuccguauguucagaaucucggcugugguggcaaccgacaaaaugacauucacuucuggaggcacacuuuuuggugauggaugugcuucuuccguggcuggugaagugaugaacugucaaacaguacuguguauuuuguggacaccauuugucuucugcccaucgauugcaguuauaauuauccccugcguuuucacaaguaaagcacuugaagcuauuuggaaaugguguagggucgagaggaggccucacauuauagaaguugauguucuuggcaaaugcccagcuuucugagaagauaacgaucuggacaacagcuauagcgagagcgugacagaggagcagcaugcugaccuugugugcugggcgguccgaacucuuauaucuugagaaggagaaugugguugucaggcuccucucuggaacagugaaaagguuugcacucagaguaaucagcaacauccaugugauuaacaagagcagccuaguccaggaggguugccaacagcaggcagaaguguggcauauuugaaggauggagguagauaaugucuuucacugugaagucucgggacugagcagcuuucagacaauccgccagcaggcucaggagcaggagccaggccagagcagggccagguuccauggcagacugaagugucacucauacagagggccugggagugggcacucagggcaacaggagagaacuugcacaguucuagacggugggaauuccaagaucagggcaccagcagauuccgugucuggugagggcuguucucugcuuccaaaauagugccuuguugcucacccugcaacuuaggauuagguuuacagccucugugcucacacaguagcuuuugcauaacuuuuucucaggcuuuuugaugauauucgguaauugugcacuuccaucugugucucuuccauaagacuguaaguuccuuaaaggaagagacggugucuuucuucuacuuauauucacgguaccuuugaaaaugagaaggaaaagauaaggguauguuuuuucccauuguuuugcuggagcucggaagccucuucuuucucuugcuugagauugcucaaggagguuguucuuuaugugcauuuacagagugguuggucuuucaugccc

SEQ ID NO: 2063 - skipped

SEQ ID NO: 2064 - RNA, 5381 nt, Homo sapiens
ccagcuccucacucuuauccugaguagucauuccuucaguuuuagagacuggcucacucgguaugagaacagcccuuccguccuucuggcuguccagaagaaauggcagcucagauuuugcuuuuaccuucccagaaucuguucucauuuucccagaacuuccccuucccuuccugcuuuugccaucaccugccauucucuuaaaugguucauucucuaccccagggaccuguaccaacacuuggcccugcagcugcucagaaguaaagaugcugaucucuugucuuucguugggaaaagcuuccuuuuuuaguucuuuauccucuucagcuccuucaggaaacuccuucaguuugacauucugcaguuuagucauuuuacuuucauuauucccuucuuuuagauuacauucuaauggauuacuugcuaucaaaguggguaccaaauuugguauuucuuuugcugcuguggguuuugaaacuacacccauaaccucuugguccaagaaaggagagcaacccucuuuaagucugauauccaaagggguuucuacauuguaugcagaaacuucugcuagggguccuuucagauugagagggccuacugacuggcuuuuaucuacaggagucuucagguggggugcaggcugugguuuguauucauguugcuucagcaauuucuugucuugguuuuguaguacugacuuguuacuuuugcucucuuccucuacucucagcuuagacugagaacuuauugcaguuuugggggcuucuucagaaggauauaaaggaauucugagacucucugagacaaaguucucagcuaccagucuggcugcacuggaguuaacuaaacauucccuuuucaaguuuucuccagauacaaguccauauucuguacccauagugguaggcuggcuggggagaacaccugauuuuugugugucagcugcaaauggaugaccuuuaggcuuaucugcauugucaucauccgaagguccuccagcccgugguugagaauaucucuuuugcuuugguuucuucuucuuuuucuucaucauuauuggugugcuuucuauaucccaggccucccugccaagaucccucugggguucaagugagucaacaugaauacuuuuucuuugguucccaggcccaccacaggaggaugaaccagagacccaaccugacucagacaaagagcaguggcccagccugugaucaagagucuuccauggaggagagccucccagcagcucaggagggacccuggcaggcuugggccggguugaccugcggucacugggucugcaaacuuguuuggcuugugugggagggguaccgcaauacaugaaguuggcugaggucucugaagaaagcucagaagguugacuguugcaugguuuccuuuccccuaguuuuucuaacacagaauccuccucggccggcaagcugcacuuuuuccccguuccugugacgguuucuggugaaaucaugaaaguaggugcagcugacugccccacauccugcagagauucuaaaugggaauccucacuuauuccuuuuuguguuugugcaauuuccaugucuuuaauuggaacugguguugccucuguuucugagagugguggaacaucuuuggcuggagucacauuguuggccagggucagaaccccauccuuagccaggggugcuucuguuuugagggcugggaccugauccucagucagggccaccuccauuucuggaggcagacauacguucuugaugagaacuacuucuguuucuggagguggagucacauccuugcccagagccauuucuguuucugauaguggagacauguccuucaacaagcccacuucuuuuacuguggacggagccacauccuuggccggggcuauuucuguuucugggaguugagccauguccuugacuggggccaccucugcuucuaaagguagugcuuuauccuuggucaagaucacguugguuuccgggggcagugucaugucccuggccagggcuaccucuguuucugaggacaaagccaccuucucagcagaggauauuucuguggaugauauaaugucauuagccugugccaccucuauuucugagaguaauaccaaauccuuggcugggacuaucuuguuuucuuuggguggucccauguccuuggaaggagccaaguccauuuuuauaggagaugcccucucuguuucuuucuuguuuucuuuggguggucccauguccuuggaaggggcuaaguccauuuuuauaggagaugcccucucuguuucuuucaacagugucacauccuuggcuggggcuaccucuguuucugugggcaguaccacauucuuggcugaagauacaucuguuucugugggccaucugacauccuuaaccagggccacuucuuuuucuguggguaguuccauguccuugacuagggccauaucugauuccauggauggcugcauguccuuggccagugucacaucuaauuuggugggugauuccauaucuuuagccaaugccaccucgguuuuuguagcuagugccauguccuuggcgagggccaucucuguuucuuuagauggugccaugucaguagucuucagucccaucauuauuuccaaugcuugugcugguggccucucuucugaugccauuucuaucuccuuggcuagcucuaagggaacugccguuggcugaggagguucugcaacagccucuggggaaacaaaggacucugaguguggagaguuuaaggcuuccacagaccaccccugagguacaacagcuguguugcagggagacauaccguaacugucuuucaagggaucauuuuguccugcaaauauugaaguaucagcugucgcacuggagggaaagaccaaaucugccaggucaucaucaugguacaucuuaaagggaucaagcuucucuggcucaucgggcccugugccugcaaugcagcugcucuccagaccguaggugggauccacuuucccagaggcucgugcugcuucuuguacuuucuugacaugagcuucaaccaauuccagugguaccuccucccggacccgagaaaacuccuccaaagccgcuuuugcugcagcagaugccacgcgaggguccaccacagaugccaaaaaagcaacaguacucauaacuggauuuccugacugacugaaggggacaggcugguaggccaaaggcccaagggaagcaucugaauucucaagguauggguccucaaugggaagucucaaaaaguggaggaugcauucauccugaguacgacuuccaacauguuccgacacuuuguuccaaucauccuuguacaucuccagggccuccaggaguagaagggucuccuguucaguccauucucuuccagcacuagcaccuuuacucuuugcuaauguuuucuuggaguaaaugucaguacggagaccaaaguucugcaaaucaacugguuuuuccuuguuuuucucaggaaaauuuagcaucuguugagcagcaggaaccugaggugaucgaagaugcagaggcacaagcccagaggggguaucagcuaauacauuaaaaugaggaguaggaggaggucccauugccaugggucuacuuuccgggucaacuugguaauuaacgaguccccacugcucuaaaaaggcauggacccucaucacagcacacacaucuccagucaaguuccuccgacaagcagugcuaguuaaauacucuuggggguuuagacgauacgugucaaucauaaaauuucgauaugccaaguauauuucuggagucuuggauuuguuuuuuccauugaagaacucaggaagagcacgccguucaaucacaugaauacaguuauaaucaaaccaugaugcauaacuaggaauaauaaugugauuggucugcucugucacauuaucuuccccaaggucaacugaucgacucugaucaccuuuggcaggaucuucaucuuccuuuccuccugcugugacuguuucuucauccugcucaucuagauccgcuacaguuccuccuuuaacagguguauuuucacuaucuuucuuuagguucacauuuuugggaaguacuacuucuucuauauuggguacagguguugggucuuccauauccuugguuagaucuucuugcucaucuuccucuuucugacuucugcgcuucccauaaaggcuagcuuggccuuucuucccacucuucuuccgugauucuguuggugucggagggggaggcgaaggcgaauguuuccucuuucgagcauuagcugaugcuuuucuaucucuucuuucuggacuucugacuggcucuucauucuugguugaaauccgcugacgaaaacucacaggcuuccuauuuucauccaccucauaauccuccucauucauccauucauugaaaauaucaguguccaaaauccauuucacaugaaccuuccaugguuuuucuggaauugguggaucuucaauuucagcaucaacaucauuacuauggacccaaguaucauagcugucuggguaaaagccccaaugcacuaacacuugcuucucuuuucucaucaccggucucaaccauucuucaucgucuugugaggaagaauauggguaaauguggugggaagcuuuugacuucucauccguaaauguucccugaugucguuugaugauaucuuucaauuuguuagccaacuucagaucaaugucuggaaugagguagauguugggucuggucaaacaauuguucugcaccaauguuuuuucaauguucauaaacauuuccacauuacgauccauucgagauggguucuguaggucaaaccuccgccaucccuguucauuuuuauacuuguaagcagccccaagaaugugacauaaggcgccuccagcuuugaaauccaugaaacacuuugcagggaguuuggugaaggccggguuggugacaugcuucccaaaggcaucuuccuggaacugaagaagcugcaccaccagcccagccaguguuuuauugguaggagcauccgcaugaacauacuucuuguagugcuugcccagccagacccgcaccgaauccagcugggacaccgucuccgggcucucccaaaacuugguggccgggcccccauccuuccgucgauaaacagcuaggccugcggcugccgccgcaauccccgagcccguggcgccuaccgcuguccccggcccgccgccgcccgccgcugcggccaucgucgcagcccgucguccccacagccuggcccaccccggcccucgcgguguuucccggucguucccgcgcgcacccccgcgcgcguagccgccacugccgcuucccggccccgcccag

SEQ ID NO: 2065 - RNA, 3232 nt, Homo sapiens
auuaccaccuccagggacaugcuuaauauuguccuuggaaccacacuuggacugaauauggcuguagcucacuuuuuuggagacuaucuggacuuuccccgcagguuguuucugugcacuugcaauugggccggcuguuuuagugacugcauuagauucaggcuuucggguuguagcagcugccucuguuuuuuucucuacuuuggccuuggagcggacauucuucagaucaggagcagaaguauugguggccaggcggcugagccggggggugguggagcuggguuuggccgaggugggcuucuugucuaugaaaggaguuguggagggccgggagggcauggguguggccuugacucggcugggaaccaccccugcagcgggggcugucccacugagaguggugguuuucuucauggaacugguggaggugcucuuugggcgacucaagucagcugguacagacuuugcagucaucuucuugacuucugcagguuuucccucagucuuaauggcagugggcuucuugggcaggagcguggaggggcuccuacugcuugggccaguugaggcaacagcagcagcuguugugguuuuugcaacagucugagugcucuuggacccagaucuggaggcuggggcagaagcuggcuuggauggugaggcccgcuucucaggagccuuugcaucugcaaugggcuuuggcuucacgucuuuugaagguaagauggaaggccuggcagaggcgacggcagggcguuuggguggggcagcuggcacuaagccugaagcaaggcucauggguuuuuuauucaacccaccaaugguggugggagcuggcugcuuagggagagaagugggcuguguuuuggcuuucgauguugaagucuuugcagguugagugguggccaaaggcuuuguuuucuucucugggcuuggugggagcuccuuguucggugggguggugaugucauuuccugucccacucaccacaggccuuccuucuucuggccuggcuauuccaagcuucucuggcucaucgggcccugugccugcaaugcagcugcucuccagaccguaggugggauccacuuucccagaggcucgugcugcuucuuguacuuucuugacaugagcuucaaccaauuccagugguaccuccucccggacccgagaaaacuccuccaaagccgcuuuugcugcagcagaugccacgcgaggguccaccacagaugccaaaaaagcaacaguacucauaacuggauuuccugacugacugaaggggacaggcugguaggccaaaggcccaagggaagcaucugaauucucaagguauggguccucaaugggaagucucaaaaaguggaggaugcauucauccugaguacgacuuccaacauguuccgacacuuuguuccaaucauccuuguacaucuccagggccuccaggaguagaagggucuccuguucaguccauucucuuccagcacuagcaccuuuacucuuugcuaauguuuucuuggaguaaaugucaguacggagaccaaaguucugcaaaucaacugguuuuuccuuguuuuucucaggaaaauuuagcaucuguugagcagcaggaaccugaggugaucgaagaugcagaggcacaagcccagaggggguaucagcuaauacauuaaaaugaggaguaggaggaggucccauugccaugggucuacuuuccgggucaacuugguaauuaacgaguccccacugcucuaaaaaggcauggacccucaucacagcacacacaucuccagucaaguuccuccgacaagcagugcuaguuaaauacucuuggggguuuagacgauacgugucaaucauaaaauuucgauaugccaaguauauuucuggagucuuggauuuguuuuuuccauugaagaacucaggaagagcacgccguucaaucacaugaauacaguuauaaucaaaccaugaugcauaacuaggaauaauaaugugauuggucugcucugucacauuaucuuccccaaggucaacugaucgacucugaucaccuuuggcaggaucuucaucuuccuuuccuccugcugugacuguuucuucauccugcucaucuagauccgcuacaguuccuccuuuaacagguguauuuucacuaucuuucuuuagguucacauuuuugggaaguacuacuucuucuauauuggguacagguguugggucuuccauauccuugguuagaucuucuugcucaucuuccucuuucugacuucugcgcuucccauaaaggcuagcuuggccuuucuucccacucuucuuccgugauucuguuggugucggagggggaggcgaaggcgaauguuuccucuuucgagcauuagcugaugcuuuucuaucucuucuuucuggacuucugacuggcucuucauucuugguugaaauccgcugacgaaaacucacaggcuuccuauuuucauccaccucauaauccuccucauucauccauucauugaaaauaucaguguccaaaauccauuucacaugaaccuuccaugguuuuucuggaauugguggaucuucaauuucagcaucaacaucauuacuauggacccaaguaucauagcugucuggguaaaagccccaaugcacuaacacuugcuucucuuuucucaucaccggucucaaccauucuucaucgucuugugaggaagaauauggguaaauguggugggaagcuuuugacuucucauccguaaauguucccugaugucguuugaugauaucuuucaauuuguuagccaacuucagaucaaugucuggaaugagguagauguugggucuggucaaacaauuguucugcaccaauguuuuuucaauguucauaaacauuuccacauuacgauccauucgagauggguucuguaggucaaaccuccgccaucccuguucauuuuuauacuuguaagcagccccaagaaugugacauaaggcgccuccagcuuugaaauccaugaaacacuuugcagggaguuuggugaaggccggguuggugacaugcuucccaaaggcaucuuccuggaacugaagaagcugcaccaccagcccagccaguguuuuauugguaggagcauccgcaugaacauacuuggaauagcacguccugcggccucagccgccucuuccgccauccuccguaggcugcauucugcccuagugagcgccgguuuuu

SEQ ID NO: 2066 - RNA, 7533 nt, Homo sapiens
cugcgugaugggacaucaggcagcuuuauuuauuuacucuuaaaacuguuacaacagaaucauggacugacacagguaauggcugagccauaagcaaaucgagaaguacagaaaugucccaccccaaacagcugcggaguacacaucacacagggccucuggucccggccuucucaggugcucuggaguggaggauccuuugagggaacucugaccacuccuguugucuaccuagagagcacgccacuugggccaccuacccccaaccuuuggccaaaggagugaaaggaccuggaaccugucgucaaccucagcauccucaugaccccaggacagacgcaguggaggcagcagguacucugggccugugcuguugccccugaggugucuccugacuacgcaacccuguuuccuucccacuuucaucccagcaggcccuuucuuccugcugacaaaacacuggcucccucauguucuuggcacagcagaaguguucugcacauggucucuacggaggaaagcuggucccccuggcccaggcagcacuuccuccgugagccccugcaguuuccuggugugugcuuggggagcuagggacauggugucaaaccuccacaaggcacugcuaccucagaaagggggaggaccugucaggcccaggacagccucccugcacauggagaucaaaucuaaacuuaggucaagaccccuaccuucuccagggaugccaggaccagagaagggcagaggucaggagggggcaugaggaggccaagucuggggcagccuccucagaggcaaaucuacacugcagccaaucccccuccagagaagcccuuggaaucucccaggccauuucacuacaaacuuauguuugaauccuuuauuagaaaccaugcaaacuuuaauacaaaaaauacaagugcaauaagaaucuuugugucaauacaguucccgggauuucuccucacugcagccaucccaaggccuagcugggaugcccucugugggccuugccucuccucccuccccucuccagucagggcauaagggaagcagauagccuuagucucaugccuuuuauuuuuaaauuuccagaccugauuuccuacuaucugcaugaggcucccuuggacaugagggcuuacauguccuagggugugggugccggccugaaggaauuccaucuccuggcccuuucuuguucuccagcccuggcuuuuuauccuagggcugaccaccagaucccagggaaugggacagagaugccaaaaccagccucuugguuagaaaagaaaagcagcauacacacaacaaaauggcaaaaccaaccaguccacgcuccaagggccccuugugugccugaccggcucaccagccacagccucugcaccccucuucccugccgcaccgccuccagggcccuaagcugcccacauccuccagcggggguggcauaaggauaucuccgcccuguucccucuaacacuuacugaggacuuucauguagacauggcuucaaccugcagaacuauuuugccaguuuuuagguuauuagaaaaaaauaaaaggacaaaacaagaaaaaugugacagcagcuaggcggguauguuaagcauggggacaggcagcacugacccccaacuuggggcagggcagcaagaagggcccgacaccaccugcauggggaggggggggcgcccauuugugggaccagagggagaggcaguggcuuaagcuccacggucagcguccugucaccacucggaauccaccuccacucuucccuccagguagauccagggagaagggagggcaugucaguuucuuuuggguuuggaccaaagaaccaaaaaaagaugaggauagaaucugguucuccucuccuagaucccaacuuagccucaaccaccccaacccccucccaaccuccuccacggagcaguggcgcagugauggggcaagaccaaagcagggagaugggcccaggcuggggagugagaggagguguggggcagggcugcugcugccccgggcacgcaaagcaggagggaaggcgagccuagcgggcugcccagcacggcgcccaagcgcucacuggucuaguggacagcccgggaaagggggccaaggacccgggagcccgaguuggggccgccagggaaguguggggggcgggagacaaugucggccccguggucggugcgggcccuggcauuugcccggaacgucagccuguaggucucaaucuucacagcaccuccugcagguagguggcccacauuaucgagggaucccaccuuggccugggccuucuccuugaaguucaacuucugacuuucaaucuugacaucuccuccaccaggcuugugcuugauguuagccuuagacccacacuuggaggagaccuuagagauguccacuuucuuguucugaaucugaacauuaccaccuccagggacaugcuuaauauuguccuuggaaccacacuuggacugaauauggcuguagcucacuuuuuuggagacuaucuggacuuuccccgcagguuguuucugugcacuugcaauugggccggcuguuuuagugacugcauuagauucaggcuuucggguuguagcagcugccucuguuuuuuucucuacuuuggcccggccuccuccaggcugaugcuugauguuuuccguggagccaaccuuggagcggacauucuucagaucaggagcagaaguauugguggccaggcggcugagccggggggugguggagcuggguuuggccgaggugggcuucuugucuaugaaaggaguuguggagggccgggagggcauggguguggccuugacucggcugggaaccaccccugcagcgggggcugucccacugagaguggugguuuucuucauggaacugguggaggugcucuuugggcgacucaagucagcugguacagacuuugcagucaucuucuugacuucugcagguuuucccucagucuuaauggcagugggcuucuugggcaggagcguggaggggcuccuacugcuugggccaguugaggcaacagcagcagcuguugugguuuuugcaacagucugagugcucuuggacccagaucuggaggcuggggcagaagcuggcuuggauggugaggcccgcuucucaggagccuuugcaucugcaaugggcuuuggcuucacgucuuuugaagguaagauggaaggccuggcagaggcgacggcagggcguuuggguggggcagcuggcacuaagccugaagcaaggcucauggguuuuuuauucaacccaccaaugguggugggagcuggcugcuuagggagagaagugggcuguguuuuggcuuucgauguugaagucuuugcagguugagugguggccaaaggcuuuguuuucuucucugggcuuggugggagcuccuuguucggugggguggugaugucauuuccugucccacucaccacaggccuuccuucuucuggccuggcuauuccugaggucucugaagaaagcucagaagguugacuguugcaugguuuccuuuccccuaguuuuucuaacacagaauccuccucggccggcaagcugcacuuuuuccccguuccugugacgguuucuggugaaaucaugaaaguaggugcagcugacugccccacauccugcagagauucuaaaugggaauccucacuuauuccuuuuuguguuugugcaauuuccaugucuuuaauuggaacugguguugccucuguuucugagagugguggaacaucuuuggcuggagucacauuguuggccagggucagaaccccauccuuagccaggggugcuucuguuuugagggcugggaccugauccucagucagggccaccuccauuucuggaggcagacauacguucuugaugagaacuacuucuguuucuggagguggagucacauccuugcccagagccauuucuguuucugauaguggagacauguccuucaacaagcccacuucuuuuacuguggacggagccacauccuuggccggggcuauuucuguuucugggaguugagccauguccuugacuggggccaccucugcuucuaaagguagugcuuuauccuuggucaagaucacguugguuuccgggggcagugucaugucccuggccagggcuaccucuguuucugaggacaaagccaccuucucagcagaggauauuucuguggaugauauaaugucauuagccugugccaccucuauuucugagaguaauaccaaauccuuggcugggacuaucuuguuuucuuuggguggucccauguccuuggaaggagccaaguccauuuuuauaggagaugcccucucuguuucuuucuuguuuucuuuggguggucccauguccuuggaaggggcuaaguccauuuuuauaggagaugcccucucuguuucuuucaacagugucacauccuuggcuggggcuaccucuguuucugugggcaguaccacauucuuggcugaagauacaucuguuucugugggccaucugacauccuuaaccagggccacuucuuuuucuguggguaguuccauguccuugacuagggccauaucugauuccauggauggcugcauguccuuggccagugucacaucuaauuuggugggugauuccauaucuuuagccaaugccaccucgguuuuuguagcuagugccauguccuuggcgagggccaucucuguuucuuuagauggugccaugucaguagucuucagucccaucauuauuuccaaugcuugugcugguggccucucuucugaugccauuucuaucuccuuggcuagcucuaagggaacugccguuggcugaggagguucugcaacagccucuggggaaacaaaggacucugaguguggagaguuuaaggcuuccacagaccaccccugagguacaacagcuguguugcagggagacauaccguaacugucuuucaagggaucauuuuguccugcaaauauugaaguaucagcugucgcacuggagggaaagaccaaaucugccaggucaucaucaugguacaucuuaaagggaucaagcuucucuggcucaucgggcccugugccugcaaugcagcugcucuccagaccguaggugggauccacuuucccagaggcucgugcugcuucuuguacuuucuugacaugagcuucaaccaauuccagugguaccuccucccggacccgagaaaacuccuccaaagccgcuuuugcugcagcagaugccacgcgaggguccaccacagaugccaaaaaagcaacaguacucauaacuggauuuccugacugacugaaggggacaggcugguaggccaaaggcccaagggaagcaucugaauucucaagguauggguccucaaugggaagucucaaaaaguggaggaugcauucauccugaguacgacuuccaacauguuccgacacuuuguuccaaucauccuuguacaucuccagggccuccaggaguagaagggucuccuguucaguccauucucuuccagcacuagcaccuuuacucuuugcuaauguuuucuuggaguaaaugucaguacggagaccaaaguucugcaaaucaacugguuuuuccuuguuuuucucaggaaaauuuagcaucuguugagcagcaggaaccugaggugaucgaagaugcagaggcacaagcccagaggggguaucagcuaauacauuaaaaugaggaguaggaggaggucccauugccaugggucuacuuuccgggucaacuugguaauuaacgaguccccacugcucuaaaaaggcauggacccucaucacagcacacacaucuccagucaaguuccuccgacaagcagugcuaguuaaauacucuuggggguuuagacgauacgugucaaucauaaaauuucgauaugccaaguauauuucuggagucuuggauuuguuuuuuccauugaagaacucaggaagagcacgccguucaaucacaugaauacaguuauaaucaaaccaugaugcauaacuaggaauaauaaugugauuggucugcucugucacauuaucuuccccaaggucaacugaucgacucugaucaccuuuggcaggaucuucaucuuccuuuccuccugcugugacuguuucuucauccugcucaucuagauccgcuacaguuccuccuuuaacagguguauuuucacuaucuuucuuuagguucacauuuuugggaaguacuacuucuucuauauuggguacagguguugggucuuccauauccuugguuagaucuucuugcucaucuuccucuuucugacuucugcgcuucccauaaaggcuagcuuggccuuucuucccacucuucuuccgugauucuguuggugucggagggggaggcgaaggcgaauguuuccucuuucgagcauuagcugaugcuuuucuaucucuucuuucuggacuucugacuggcucuucauucuugguugaaauccgcugacgaaaacucacaggcuuccuauuuucauccaccucauaauccuccucauucauccauucauugaaaauaucaguguccaaaauccauuucacaugaaccuuccaugguuuuucuggaauugguggaucuucaauuucagcaucaacaucauuacuauggacccaaguaucauagcugucuggguaaaagccccaaugcacuaacacuugcuucucuuuucucaucaccggucucaaccauucuucaucgucuugugaggaagaauauggguaaauguggugggaagcuuuugacuucucauccguaaauguucccugaugucguuugaugauaucuuucaauuuguuagccaacuucagaucaaugucuggaaugagguagauguugggucuggucaaacaauuguucugcaccaauguuuuuucaauguucauaaacauuuccacauuacgauccauucgagauggguucuguaggucaaaccuccgccaucccuguucauuuuuauacuuguaagcagccccaagaaugugacauaaggcgccuccagcuuugaaauccaugaaacacuuugcagggaguuuggugaaggccggguuggugacaugcuucccaaaggcaucuuccuggaacugaagaagcugcaccaccagcccagccaguguuuuauugguaggagcauccgcaugaacauacuucuuguagugcuugcccagccagacccgcaccgaauccagcugggacaccgucuccgggcucucccaaaacuugguggccgggcccccauccuuccgucgauaaacagcuaggccugcggcugccgccgcaauccccgagcccguggcgccuaccgcuguccccggcccgccgccgcccgccgcugcggccaucgucgcagcccgucguccccacagccuggcccaccccggcccucgcgguguuucccggucguucccgcgcgcacccccgcgcgcguagccgccacugccgcuucccggccccgcccag

SEQ ID NO: 2067 - RNA, 7428 nt, Homo sapiens
cugcgugaugggacaucaggcagcuuuauuuauuuacucuuaaaacuguuacaacagaaucauggacugacacagguaauggcugagccauaagcaaaucgagaaguacagaaaugucccaccccaaacagcugcggaguacacaucacacagggccucuggucccggccuucucaggugcucuggaguggaggauccuuugagggaacucugaccacuccuguugucuaccuagagagcacgccacuugggccaccuacccccaaccuuuggccaaaggagugaaaggaccuggaaccugucgucaaccucagcauccucaugaccccaggacagacgcaguggaggcagcagguacucugggccugugcuguugccccugaggugucuccugacuacgcaacccuguuuccuucccacuuucaucccagcaggcccuuucuuccugcugacaaaacacuggcucccucauguucuuggcacagcagaaguguucugcacauggucucuacggaggaaagcuggucccccuggcccaggcagcacuuccuccgugagccccugcaguuuccuggugugugcuuggggagcuagggacauggugucaaaccuccacaaggcacugcuaccucagaaagggggaggaccugucaggcccaggacagccucccugcacauggagaucaaaucuaaacuuaggucaagaccccuaccuucuccagggaugccaggaccagagaagggcagaggucaggagggggcaugaggaggccaagucuggggcagccuccucagaggcaaaucuacacugcagccaaucccccuccagagaagcccuuggaaucucccaggccauuucacuacaaacuuauguuugaauccuuuauuagaaaccaugcaaacuuuaauacaaaaaauacaagugcaauaagaaucuuugugucaauacaguucccgggauuucuccucacugcagccaucccaaggccuagcugggaugcccucugugggccuugccucuccucccuccccucuccagucagggcauaagggaagcagauagccuuagucucaugccuuuuauuuuuaaauuuccagaccugauuuccuacuaucugcaugaggcucccuuggacaugagggcuuacauguccuagggugugggugccggccugaaggaauuccaucuccuggcccuuucuuguucuccagcccuggcuuuuuauccuagggcugaccaccagaucccagggaaugggacagagaugccaaaaccagccucuugguuagaaaagaaaagcagcauacacacaacaaaauggcaaaaccaaccaguccacgcuccaagggccccuugugugccugaccggcucaccagccacagccucugcaccccucuucccugccgcaccgccuccagggcccuaagcugcccacauccuccagcggggguggcauaaggauaucuccgcccuguucccucuaacacuuacugaggacuuucauguagacauggcuucaaccugcagaacuauuuugccaguuuuuagguuauuagaaaaaaauaaaaggacaaaacaagaaaaaugugacagcagcuaggcggguauguuaagcauggggacaggcagcacugacccccaacuuggggcagggcagcaagaagggcccgacaccaccugcauggggaggggggggcgcccauuugugggaccagagggagaggcaguggcuuaagcuccacggucagcguccugucaccacucggaauccaccuccacucuucccuccagguagauccagggagaagggagggcaugucaguuucuuuuggguuuggaccaaagaaccaaaaaaagaugaggauagaaucugguucuccucuccuagaucccaacuuagccucaaccaccccaacccccucccaaccuccuccacggagcaguggcgcagugauggggcaagaccaaagcagggagaugggcccaggcuggggagugagaggagguguggggcagggcugcugcugccccgggcacgcaaagcaggagggaaggcgagccuagcgggcugcccagcacggcgcccaagcgcucacuggucuaguggacagcccgggaaagggggccaaggacccgggagcccgaguuggggccgccagggaaguguggggggcgggagacaaugucggccccguggucggugcgggcccuggcauuugcccggaacgucagccuguaggucucaaucuucacagcaccuccugcagguagguggcccacauuaucgagggaucccaccuuggccugggccuucuccuugaaguucaacuucugacuuucaaucuugacaucuccuccaccaggcuugugcuugauguuagccuuagacccacacuuggaggagaccuuagagauguccacuuucuuguucugaaucugaacauuaccaccuccagggacaugcuuaauauuguccuuggaaccacacuuggacugaauauggcuguagcucacuuuuuuggagacuaucuggacuuuccccgcagguuguuucugugcacuugcaauugggccggcuguuuuagugacugcauuagauucaggcuuucggguuguagcagcugccucuguuuuuuucucuacuuuggcccggccuccuccaggcugaugcuugauguuuuccguggagccaaccuuggagcggacauucuucagaucaggagcagaaguauugguggccaggcggcugagccggggggugguggagcuggguuuggccgaggugggcuucuugucuaugaaaggaguuguggagggccgggagggcauggguguggccuugacucggcugggaaccaccccugcagcgggggcugucccacugagaguggugguuuucuucauggaacugguggaggugcucuuugggcgacucaagucagcugguacagacuuugcagucaucuucuugacuucugcagguuuucccucagucuuaauggcagugggcuucuugggcaggagcguggaggggcuccuacugcuugggccaguugaggcaacagcagcagcuguugugguuuuugcaacagucugagugcucuuggacccagaucuggaggcuggggcagaagcuggcuuggauggugaggcccgcuucucaggagccuuugcaucugcaaugggcuuuggcuucacgucuuuugaagguaagauggaaggccuggcagaggcgacggcagggcguuuggguggggcagcuggcacuaagccugaagcaaggcucauggguuuuuuauucaacccaccaaugguggugggagcuggcugcuuagggagagaagugggcuguguuuuggcuuucgauguugaagucuuugcagguugagugguggccaaaggcuuuguuuucuucucugggcuuggugggagcuccuuguucggugggguggugaugucauuuccugucccacucaccacaggccuuccuucuucuggccuggcuauuccugaggucucugaagaaagcucagaagguugacuguugcaugguuuccuuuccccuaguuuuucuaacacagaauccuccucggccggcaagcugcacuuuuuccccguuccugugacgguuucuggugaaaucaugaaaguaggugcagcugacugccccacauccugcagagauucuaaaugggaauccucacuuauuccuuuuuguguuugugcaauuuccaugucuuuaauuggaacugguguugccucuguuucugagagugguggaacaucuuuggcuggagucacauuguuggccagggucagaaccccauccuuagccaggggugcuucuguuuugagggcugggaccugauccucagucagggccaccuccauuucuggaggcagacauacguucuugaugagaacuacuucuguuucuggagguggagucacauccuugcccagagccauuucuguuucugauaguggagacauguccuucaacaagcccacuucuuuuacuguggacggagccacauccuuggccggggcuauuucuguuucugggaguugagccauguccuugacuggggccaccucugcuucuaaagguagugcuuuauccuuggucaagaucacguugguuuccgggggcagugucaugucccuggccagggcuaccucuguuucugaggacaaagccaccuucucagcagaggauauuucuguggaugauauaaugucauuagccugugccaccucuauuucugagaguaauaccaaauccuuggcugggacuaucuuguuuucuuuggguggucccauguccuuggaaggagccaaguccauuuuuauaggagaugcccucucuguuucuuucuuguuuucuuuggguggucccauguccuuggaaggggcuaaguccauuuuuauaggagaugcccucucuguuucuuucaacagugucacauccuuggcuggggcuaccucuguuucugugggcaguaccacauucuuggcugaagauacaucuguuucugugggccaucugacauccuuaaccagggccacuucuuuuucuguggguaguuccauguccuugacuagggccauaucugauuccauggauggcugcauguccuuggccagugucacaucuaauuuggugggugauuccauaucuuuagccaaugccaccucgguuuuuguagcuagugccauguccuuggcgagggccaucucuguuucuuuagauggugccaugucaguagucuucagucccaucauuauuuccaaugcuugugcugguggccucucuucugaugccauuucuaucuccuuggcuagcucuaagggaacugccguuggcugaggagguucugcaacagccucuggggaaacaaaggacucugaguguggagaguuuaaggcuuccacagaccaccccugagguacaacagcuguguugcagggagacauaccguaacugucuuucaagggaucauuuuguccugcaaauauugaaguaucagcugucgcacuggagggaaagaccaaaucugccaggucaucaucaugguacaucuuaaagggaucagucuggauaggaucgaccacuugcucagguuggaaacaaaaguugguaucuucuggccaguucuggcuauuuggguauuccugguaggccauuuucucuucaaggaauucaguuggagacccaagcuucucuggcucaucgggcccugugccugcaaugcagcugcucuccagaccguaggugggauccacuuucccagaggcucgugcugcuucuuguacuuucuugacaugagcuucaaccaauuccagugguaccuccucccggacccgagaaaacuccuccaaagccgcuuuugcugcagcagaugccacgcgaggguccaccacagaugccaaaaaagcaacaguacucauaacuggauuuccugacugacugaaggggacaggcugguaggccaaaggcccaagggaagcaucugaauucucaagguauggguccucaaugggaagucucaaaaaguggaggaugcauucauccugaguacgacuuccaacauguuccgacacuuuguuccaaucauccuuguacaucuccagggccuccaggaguagaagggucuccuguucaguccauucucuuccagcacuagcaccuuuacucuuugcuaauguuuucuuggaguaaaugucaguacggagaccaaaguucugcaaaucaacugguuuuuccuuguuuuucucaggaaaauuuagcaucuguugagcagcaggaaccugaggugaucgaagaugcagaggcacaagcccagaggggguaucagcuaauacauuaaaaugaggaguaggaggaggucccauugccaugggucuacuuuccgggucaacuugguaauuaacgaguccccacugcucuaaaaaggcauggacccucaucacagcacacacaucuccagucaaguuccuccgacaagcagugcuaguuaaauacucuuggggguuuagacgauacgugucaaucauaaaauuucgauaugccaaguauauuucuggagucuuggauuuguuuuuuccauugaagaacucaggaagagcacgccguucaaucacaugaauacaguuauaaucaaaccaugaugcauaacuaggaauaauaaugugauuggucugcucugucacauuaucuuccccaaggucaacugaucgacucugaucaccuuuggcaggaucuucaucuuccuuuccuccugcugugacuguuucuucauccugcucaucuagauccgcuacaguuccuccuuuaacagguguauuuucacuaucuuucuuuagguucacauuuuugggaaguacuacuucuucuauauuggguacagguguugggucuuccauauccuugguuagaucuucuugcucaucuuccucuuucugacuucugcgcuucccauaaaggcuagcuuggccuuucuucccacucuucuuccgugauucuguuggugucggagggggaggcgaaggcgaauguuuccucuuucgagcauuagcugaugcuuuucuaucucuucuuucuggacuucugacuggcucuucauucuugguugaaauccgcugacgaaaacucacaggcuuccuauuuucauccaccucauaauccuccucauucauccauucauugaaaauaucaguguccaaaauccauuucacaugaaccuuccaugguuuuucuggaauugguggaucuucaauuucagcaucaacaucauuacuauggacccaaguaucauagcugucuggguaaaagccccaaugcacuaacacuugcuucucuuuucucaucaccggucucaaccauucuucaucgucuugugaggaagaauauggguaaauguggugggaagcuuuugacuucucauccguaaauguucccugaugucguuugaugauaucuuucaauuuguuagccaacuucagaucaaugucuggaaugagguagauguugggucuggucaaacaauuguucugcaccaauguuuuuucaauguucauaaacauuuccacauuacgauccauucgagauggguucuguaggucaaaccuccgccaucccuguucauuuuuauacuuguaagcagccccaagaaugugacauaaggcgccuccagcuuugaaauccaugaaacacuuugcagggaguuuggugaaggccggguuggugacaugcuucccaaaggcaucuuccuggaacugaagaagcugcaccaccagcccagccaguguuuuauugguaggagcauccgcaugaacauacuuggaauagcacguccugcggccucagccgccucuuccgccauccuccguaggcugcauucugcccuagugagcgccgguuuuu

SEQ ID NO: 2068 - RNA, 2947 nt, Homo sapiens
cugcgugaugggacaucaggcagcuuuauuuauuuacucuuaaaacuguuacaacagaaucauggacugacacagguaauggcugagccauaagcaaaucgagaaguacagaaaugucccaccccaaacagcugcggaguacacaucacacagggccucuggucccggccuucucaggugcucuggaguggaggauccuuugagggaacucugaccacuccuguugucuaccuagagagcacgccacuugggccaccuacccccaaccuuuggccaaaggagugaaaggaccuggaaccugucgucaaccucagcauccucaugaccccaggacagacgcaguggaggcagcagguacucugggccugugcuguugccccugaggugucuccugacuacgcaacccuguuuccuucccacuuucaucccagcaggcccuuucuuccugcugacaaaacacuggcucccucauguucuuggcacagcagaaguguucugcacauggucucuacggaggaaagcuggucccccuggcccaggcagcacuuccuccgugagccccugcaguuuccuggugugugcuuggggagcuagggacauggugucaaaccuccacaaggcacugcuaccucagaaagggggaggaccugucaggcccaggacagccucccugcacauggagaucaaaucuaaacuuaggucaagaccccuaccuucuccagggaugccaggaccagagaagggcagaggucaggagggggcaugaggaggccaagucuggggcagccuccucagaggcaaaucuacacugcagccaaucccccuccagagaagcccuuggaaucucccaggccauuucacuacaaacuuauguuugaauccuuuauuagaaaccaugcaaacuuuaauacaaaaaauacaagugcaauaagaaucuuugugucaauacaguucccgggauuucuccucacugcagccaucccaaggccuagcugggaugcccucugugggccuugccucuccucccuccccucuccagucagggcauaagggaagcagauagccuuagucucaugccuuuuauuuuuaaauuuccagaccugauuuccuacuaucugcaugaggcucccuuggacaugagggcuuacauguccuagggugugggugccggccugaaggaauuccaucuccuggcccuuucuuguucuccagcccuggcuuuuuauccuagggcugaccaccagaucccagggaaugggacagagaugccaaaaccagccucuugguuagaaaagaaaagcagcauacacacaacaaaauggcaaaaccaaccaguccacgcuccaagggccccuugugugccugaccggcucaccagccacagccucugcaccccucuucccugccgcaccgccuccagggcccuaagcugcccacauccuccagcggggguggcauaaggauaucuccgcccuguucccucuaacacuuacugaggacuuucauguagacauggcuucaaccugcagaacuauuuugccaguuuuuagguuauuagaaaaaaauaaaaggacaaaacaagaaaaaugugacagcagcuaggcggguauguuaagcauggggacaggcagcacugacccccaacuuggggcagggcagcaagaagggcccgacaccaccugcauggggaggggggggcgcccauuugugggaccagagggagaggcaguggcuuaagcuccacggucagcguccugucaccacucggaauccaccuccacucuucccuccagguagauccagggagaagggagggcaugucaguuucuuuuggguuuggaccaaagaaccaaaaaaagaugaggauagaaucugguucuccucuccuagaucccaacuuagccucaaccaccccaacccccucccaaccuccuccacggagcaguggcgcagugauggggcaagaccaaagcagggagaugggcccaggcuggggagugagaggagguguggggcagggcugcugcugccccgggcacgcaaagcaggagggaaggcgagccuagcgggcugcccagcacggcgcccaagcgcucacuggucuaguggacagcccgggaaagggggccaaggacccgggagcccgaguuggggccgccagggaaguguggggggcgggagacaaugucggccccguggucggugcgggcccuggcauuugcccggaacgucagccuguaggucucaauuugucuccuggaucuggcuguccaaggucugggccucccuuuggucaccacccccugacagggugggguggccauugaggccacuggcugaagugggggcgccagcuucaggcgcugccucagagauggccggcuccuccccagcagggggacccggacacagaggagccucgcugccaccgcccucagucuucacagcaccuccugcagguagguggcccacauuaucgagggaucccaccuuggccugggccuucuccuugaaguucaacuucugacuuucaaucuugacaucuccuccaccaggcuugugcuugauguuagccuuagacccacacuuggaggagaccuuagagauguccacuuucuuguucugaaucugaaccuucuuguagugcuugcccagccagacccgcaccgaauccagcugggacaccgucuccgggcucucccaaaacuugguggccgggcccccauccuuccgucgauaaacagcuaggccugcggcugccgccgcaauccccgagcccguggcgccuaccgcuguccccggcccgccgccgcccgccgcugcggccaucgucgcagcccgucguccccacagccuggcccaccccggcccucgcgguguuucccggucguucccgcgcgcacccccgcgcgcguagccgccacugccgcuucccggccccgcccag

SEQ ID NO: 2069 - RNA, 7596 nt, Homo sapiens
cugcgugaugggacaucaggcagcuuuauuuauuuacucuuaaaacuguuacaacagaaucauggacugacacagguaauggcugagccauaagcaaaucgagaaguacagaaaugucccaccccaaacagcugcggaguacacaucacacagggccucuggucccggccuucucaggugcucuggaguggaggauccuuugagggaacucugaccacuccuguugucuaccuagagagcacgccacuugggccaccuacccccaaccuuuggccaaaggagugaaaggaccuggaaccugucgucaaccucagcauccucaugaccccaggacagacgcaguggaggcagcagguacucugggccugugcuguugccccugaggugucuccugacuacgcaacccuguuuccuucccacuuucaucccagcaggcccuuucuuccugcugacaaaacacuggcucccucauguucuuggcacagcagaaguguucugcacauggucucuacggaggaaagcuggucccccuggcccaggcagcacuuccuccgugagccccugcaguuuccuggugugugcuuggggagcuagggacauggugucaaaccuccacaaggcacugcuaccucagaaagggggaggaccugucaggcccaggacagccucccugcacauggagaucaaaucuaaacuuaggucaagaccccuaccuucuccagggaugccaggaccagagaagggcagaggucaggagggggcaugaggaggccaagucuggggcagccuccucagaggcaaaucuacacugcagccaaucccccuccagagaagcccuuggaaucucccaggccauuucacuacaaacuuauguuugaauccuuuauuagaaaccaugcaaacuuuaauacaaaaaauacaagugcaauaagaaucuuugugucaauacaguucccgggauuucuccucacugcagccaucccaaggccuagcugggaugcccucugugggccuugccucuccucccuccccucuccagucagggcauaagggaagcagauagccuuagucucaugccuuuuauuuuuaaauuuccagaccugauuuccuacuaucugcaugaggcucccuuggacaugagggcuuacauguccuagggugugggugccggccugaaggaauuccaucuccuggcccuuucuuguucuccagcccuggcuuuuuauccuagggcugaccaccagaucccagggaaugggacagagaugccaaaaccagccucuugguuagaaaagaaaagcagcauacacacaacaaaauggcaaaaccaaccaguccacgcuccaagggccccuugugugccugaccggcucaccagccacagccucugcaccccucuucccugccgcaccgccuccagggcccuaagcugcccacauccuccagcggggguggcauaaggauaucuccgcccuguucccucuaacacuuacugaggacuuucauguagacauggcuucaaccugcagaacuauuuugccaguuuuuagguuauuagaaaaaaauaaaaggacaaaacaagaaaaaugugacagcagcuaggcggguauguuaagcauggggacaggcagcacugacccccaacuuggggcagggcagcaagaagggcccgacaccaccugcauggggaggggggggcgcccauuugugggaccagagggagaggcaguggcuuaagcuccacggucagcguccugucaccacucggaauccaccuccacucuucccuccagguagauccagggagaagggagggcaugucaguuucuuuuggguuuggaccaaagaaccaaaaaaagaugaggauagaaucugguucuccucuccuagaucccaacuuagccucaaccaccccaacccccucccaaccuccuccacggagcaguggcgcagugauggggcaagaccaaagcagggagaugggcccaggcuggggagugagaggagguguggggcagggcugcugcugccccgggcacgcaaagcaggagggaaggcgagccuagcgggcugcccagcacggcgcccaagcgcucacuggucuaguggacagcccgggaaagggggccaaggacccgggagcccgaguuggggccgccagggaaguguggggggcgggagacaaugucggccccguggucggugcgggcccuggcauuugcccggaacgucagccuguaggucucaaucugcagugacaugggaggagggaagggagaggggaacaggggagacaagaggggaacacgggggagacggaagacgagaccagaaugucaucauuagaugcuugucuccuggaucuggcuguccaaggucugggccucccuuuggucaccacccccugacagggugggguggccauugaggccacuggcugaagugggggcgccagcuucaggcgcugccucagagauggccggcuccuccccagcagggggacccggacacagaggagccucgcugccaccgcccucagucuucacagcaccuccugcagguagguggcccacauuaucgagggaucccaccuuggccugggccuucuccuugaaguucaacuucugacuuucaaucuugacaucuccuccaccaggcuugugcuugauguuagccuuagacccacacuuggaggagaccuuagagauguccacuuucuuguucugaaucugaacauuaccaccuccagggacaugcuuaauauuguccuuggaaccacacuuggacugaauauggcuguagcucacuuuuuuggagacuaucuggacuuuccccgcagguuguuucugugcacuugcaauugggccggcuguuuuagugacugcauuagauucaggcuuucggguuguagcagcugccucuguuuuuuucucuacuuuggcccggccuccuccaggcugaugcuugauguuuuccguggagccaaccuuggagcggacauucuucagaucaggagcagaaguauugguggccaggcggcugagccggggggugguggagcuggguuuggccgaggugggcuucuugucuaugaaaggaguuguggagggccgggagggcauggguguggccuugacucggcugggaaccaccccugcagcgggggcugucccacugagaguggugguuuucuucauggaacugguggaggugcucuuugggcgacucaagucagcugguacagacuuugcagucaucuucuugacuucugcagguuuucccucagucuuaauggcagugggcuucuugggcaggagcguggaggggcuccuacugcuugggccaguugaggcaacagcagcagcuguugugguuuuugcaacagucugagugcucuuggacccagaucuggaggcuggggcagaagcuggcuuggauggugaggcccgcuucucaggagccuuugcaucugcaaugggcuuuggcuucacgucuuuugaagguaagauggaaggccuggcagaggcgacggcagggcguuuggguggggcagcuggcacuaagccugaagcaaggcucauggguuuuuuauucaacccaccaaugguggugggagcuggcugcuuagggagagaagugggcuguguuuuggcuuucgauguugaagucuuugcagguugagugguggccaaaggcuuuguuuucuucucugggcuuggugggagcuccuuguucggugggguggugaugucauuuccugucccacucaccacaggccuuccuucuucuggccuggcuauuccugaggucucugaagaaagcucagaagguugacuguugcaugguuuccuuuccccuaguuuuucuaacacagaauccuccucggccggcaagcugcacuuuuuccccguuccugugacgguuucuggugaaaucaugaaaguaggugcagcugacugccccacauccugcagagauucuaaaugggaauccucacuuauuccuuuuuguguuugugcaauuuccaugucuuuaauuggaacugguguugccucuguuucugagagugguggaacaucuuuggcuggagucacauuguuggccagggucagaaccccauccuuagccaggggugcuucuguuuugagggcugggaccugauccucagucagggccaccuccauuucuggaggcagacauacguucuugaugagaacuacuucuguuucuggagguggagucacauccuugcccagagccauuucuguuucugauaguggagacauguccuucaacaagcccacuucuuuuacuguggacggagccacauccuuggccggggcuauuucuguuucugggaguugagccauguccuugacuggggccaccucugcuucuaaagguagugcuuuauccuuggucaagaucacguugguuuccgggggcagugucaugucccuggccagggcuaccucuguuucugaggacaaagccaccuucucagcagaggauauuucuguggaugauauaaugucauuagccugugccaccucuauuucugagaguaauaccaaauccuuggcugggacuaucuuguuuucuuuggguggucccauguccuuggaaggagccaaguccauuuuuauaggagaugcccucucuguuucuuucuuguuuucuuuggguggucccauguccuuggaaggggcuaaguccauuuuuauaggagaugcccucucuguuucuuucaacagugucacauccuuggcuggggcuaccucuguuucugugggcaguaccacauucuuggcugaagauacaucuguuucugugggccaucugacauccuuaaccagggccacuucuuuuucuguggguaguuccauguccuugacuagggccauaucugauuccauggauggcugcauguccuuggccagugucacaucuaauuuggugggugauuccauaucuuuagccaaugccaccucgguuuuuguagcuagugccauguccuuggcgagggccaucucuguuucuuuagauggugccaugucaguagucuucagucccaucauuauuuccaaugcuugugcugguggccucucuucugaugccauuucuaucuccuuggcuagcucuaagggaacugccguuggcugaggagguucugcaacagccucuggggaaacaaaggacucugaguguggagaguuuaaggcuuccacagaccaccccugagguacaacagcuguguugcagggagacauaccguaacugucuuucaagggaucauuuuguccugcaaauauugaaguaucagcugucgcacuggagggaaagaccaaaucugccaggucaucaucaugguacaucuuaaagggaucaagcuucucuggcucaucgggcccugugccugcaaugcagcugcucuccagaccguaggugggauccacuuucccagaggcucgugcugcuucuuguacuuucuugacaugagcuucaaccaauuccagugguaccuccucccggacccgagaaaacuccuccaaagccgcuuuugcugcagcagaugccacgcgaggguccaccacagaugccaaaaaagcaacaguacucauaacuggauuuccugacugacugaaggggacaggcugguaggccaaaggcccaagggaagcaucugaauucucaagguauggguccucaaugggaagucucaaaaaguggaggaugcauucauccugaguacgacuuccaacauguuccgacacuuuguuccaaucauccuuguacaucuccagggccuccaggaguagaagggucuccuguucaguccauucucuuccagcacuagcaccuuuacucuuugcuaauguuuucuuggaguaaaugucaguacggagaccaaaguucugcaaaucaacugguuuuuccuuguuuuucucaggaaaauuuagcaucuguugagcagcaggaaccugaggugaucgaagaugcagaggcacaagcccagaggggguaucagcuaauacauuaaaaugaggaguaggaggaggucccauugccaugggucuacuuuccgggucaacuugguaauuaacgaguccccacugcucuaaaaaggcauggacccucaucacagcacacacaucuccagucaaguuccuccgacaagcagugcuaguuaaauacucuuggggguuuagacgauacgugucaaucauaaaauuucgauaugccaaguauauuucuggagucuuggauuuguuuuuuccauugaagaacucaggaagagcacgccguucaaucacaugaauacaguuauaaucaaaccaugaugcauaacuaggaauaauaaugugauuggucugcucugucacauuaucuuccccaaggucaacugaucgacucugaucaccuuuggcaggaucuucaucuuccuuuccuccugcugugacuguuucuucauccugcucaucuagauccgcuacaguuccuccuuuaacagguguauuuucacuaucuuucuuuagguucacauuuuugggaaguacuacuucuucuauauuggguacagguguugggucuuccauauccuugguuagaucuucuugcucaucuuccucuuucugacuucugcgcuucccauaaaggcuagcuuggccuuucuucccacucuucuuccgugauucuguuggugucggagggggaggcgaaggcgaauguuuccucuuucgagcauuagcugaugcuuuucuaucucuucuuucuggacuucugacuggcucuucauucuugguugaaauccgcugacgaaaacucacaggcuuccuauuuucauccaccucauaauccuccucauucauccauucauugaaaauaucaguguccaaaauccauuucacaugaaccuuccaugguuuuucuggaauugguggaucuucaauuucagcaucaacaucauuacuauggacccaaguaucauagcugucuggguaaaagccccaaugcacuaacacuugcuucucuuuucucaucaccggucucaaccauucuucaucgucuugugaggaagaauauggguaaauguggugggaagcuuuugacuucucauccguaaauguucccugaugucguuugaugauaucuuucaauuuguuagccaacuucagaucaaugucuggaaugagguagauguugggucuggucaaacaauuguucugcaccaauguuuuuucaauguucauaaacauuuccacauuacgauccauucgagauggguucuguaggucaaaccuccgccaucccuguucauuuuuauacuuguaagcagccccaagaaugugacauaaggcgccuccagcuuugaaauccaugaaacacuuugcagggaguuuggugaaggccggguuggugacaugcuucccaaaggcaucuuccuggaacugaagaagcugcaccaccagcccagccaguguuuuauugguaggagcauccgcaugaacauacuuggaauagcacguccugcggccucagccgccucuuccgccauccuccguaggcugcauucugcccuagugagcgccgguuuuu

SEQ ID NO: 2070 - RNA, 2757 nt, Homo sapiens
cugcgugaugggacaucaggcagcuuuauuuauuuacucuuaaaacuguuacaacagaaucauggacugacacagguaauggcugagccauaagcaaaucgagaaguacagaaaugucccaccccaaacagcugcggaguacacaucacacagggccucuggucccggccuucucaggugcucuggaguggaggauccuuugagggaacucugaccacuccuguugucuaccuagagagcacgccacuugggccaccuacccccaaccuuuggccaaaggagugaaaggaccuggaaccugucgucaaccucagcauccucaugaccccaggacagacgcaguggaggcagcagguacucugggccugugcuguugccccugaggugucuccugacuacgcaacccuguuuccuucccacuuucaucccagcaggcccuuucuuccugcugacaaaacacuggcucccucauguucuuggcacagcagaaguguucugcacauggucucuacggaggaaagcuggucccccuggcccaggcagcacuuccuccgugagccccugcaguuuccuggugugugcuuggggagcuagggacauggugucaaaccuccacaaggcacugcuaccucagaaagggggaggaccugucaggcccaggacagccucccugcacauggagaucaaaucuaaacuuaggucaagaccccuaccuucuccagggaugccaggaccagagaagggcagaggucaggagggggcaugaggaggccaagucuggggcagccuccucagaggcaaaucuacacugcagccaaucccccuccagagaagcccuuggaaucucccaggccauuucacuacaaacuuauguuugaauccuuuauuagaaaccaugcaaacuuuaauacaaaaaauacaagugcaauaagaaucuuugugucaauacaguucccgggauuucuccucacugcagccaucccaaggccuagcugggaugcccucugugggccuugccucuccucccuccccucuccagucagggcauaagggaagcagauagccuuagucucaugccuuuuauuuuuaaauuuccagaccugauuuccuacuaucugcaugaggcucccuuggacaugagggcuuacauguccuagggugugggugccggccugaaggaauuccaucuccuggcccuuucuuguucuccagcccuggcuuuuuauccuagggcugaccaccagaucccagggaaugggacagagaugccaaaaccagccucuugguuagaaaagaaaagcagcauacacacaacaaaauggcaaaaccaaccaguccacgcuccaagggccccuugugugccugaccggcucaccagccacagccucugcaccccucuucccugccgcaccgccuccagggcccuaagcugcccacauccuccagcggggguggcauaaggauaucuccgcccuguucccucuaacacuuacugaggacuuucauguagacauggcuucaaccugcagaacuauuuugccaguuuuuagguuauuagaaaaaaauaaaaggacaaaacaagaaaaaugugacagcagcuaggcggguauguuaagcauggggacaggcagcacugacccccaacuuggggcagggcagcaagaagggcccgacaccaccugcauggggaggggggggcgcccauuugugggaccagagggagaggcaguggcuuaagcuccacggucagcguccugucaccacucggaauccaccuccacucuucccuccagguagauccagggagaagggagggcaugucaguuucuuuuggguuuggaccaaagaaccaaaaaaagaugaggauagaaucugguucuccucuccuagaucccaacuuagccucaaccaccccaacccccucccaaccuccuccacggagcaguggcgcagugauggggcaagaccaaagcagggagaugggcccaggcuggggagugagaggagguguggggcagggcugcugcugccccgggcacgcaaagcaggagggaaggcgagccuagcgggcugcccagcacggcgcccaagcgcucacuggucuaguggacagcccgggaaagggggccaaggacccgggagcccgaguuggggccgccagggaaguguggggggcgggagacaaugucggccccguggucggugcgggcccuggcauuugcccggaacgucagccuguaggucucaaucuucacagcaccuccugcagguagguggcccacauuaucgagggaucccaccuuggccugggccuucuccuugaaguucaacuucugacuuucaaucuugacaucuccuccaccaggcuugugcuugauguuagccuuagacccacacuuggaggagaccuuagagauguccacuuucuuguucugaaucugaaccuucuuguagugcuugcccagccagacccgcaccgaauccagcugggacaccgucuccgggcucucccaaaacuugguggccgggcccccauccuuccgucgauaaacagcuaggccugcggcugccgccgcaauccccgagcccguggcgccuaccgcuguccccggcccgccgccgcccgccgcugcggccaucgucgcagcccgucguccccacagccuggcccaccccggcccucgcgguguuucccggucguucccgcgcgcacccccgcgcgcguagccgccacugccgcuucccggccccgcccag

SEQ ID NO: 2071 - RNA, 5153 nt, Homo sapiens
ccagcuccucacucuuauccugaguagucauuccuucaguuuuagagacuggcucacucgguaugagaacagcccuuccguccuucuggcuguccagaagaaauggcagcucagauuuugcuuuuaccuucccagaaucuguucucauuuucccagaacuuccccuucccuuccugcuuuugccaucaccugccauucucuuaaaugguucauucucuaccccagggaccuguaccaacacuuggcccugcagcugcucagaaguaaagaugcugaucucuugucuuucguugggaaaagcuuccuuuuuuaguucuuuauccucuucagcuccuucaggaaacuccuucaguuugacauucugcaguuuagucauuuuacuuucauuauucccuucuuuuagauuacauucuaauggauuacuugcuaucaaaguggguaccaaauuugguauuucuuuugcugcuguggguuuugaaacuacacccauaaccucuugguccaagaaaggagagcaacccucuuuaagucugauauccaaagggguuucuacauuguaugcagaaacuucugcuagggguccuuucagauugagagggccuacugacuggcuuuuaucuacaggagucuucagguggggugcaggcugugguuuguauucauguugcuucagcaauuucuugucuugguuuuguaguacugacuuguuacuuuugcucucuuccucuacucucagcuuagacugagaacuuauugcaguuuugggggcuucuucagaaggauauaaaggaauucugagacucucugagacaaaguucucagcuaccagucuggcugcacuggaguuaacuaaacauucccuuuucaaguuuucuccagauacaaguccauauucuguacccauagugguaggcuggcuggggagaacaccugauuuuugugugucagcugcaaauggaugaccuuuaggcuuaucugcauugucaucauccgaagguccuccagcccgugguugagaauaucucuuuugcuuugguuucuucuucuuuuucuucaucauuauuggugugcuuucuauaucccaggccucccugccaagaucccucugggguucaagugagucaacaugaauacuuuuucuuugguucccaggcccaccacaggaggaugaaccagagacccaaccugacucagacaaagagcaguggcccagccugugaucaagagucuuccauggaggagagccucccagcagcucaggagggacccuggcaggcuugggccggguugaccugcggucacugggucugcaaacuuguuuggcuugugugggagggguaccgcaauacaugaaguuggcugaggucucugaagaaagcucagaagguugacuguugcaugguuuccuuuccccuaguuuuucuaacacagaauccuccucggccggcaagcugcacuuuuuccccguuccugugacgguuucuggugaaaucaugaaaguaggugcagcugacugccccacauccugcagagauucuaaaugggaauccucacuuauuccuuuuuguguuugugcaauuuccaugucuuuaauuggaacugguguugccucuguuucugagagugguggaacaucuuuggcuggagucacauuguuggccagggucagaaccccauccuuagccaggggugcuucuguuuugagggcugggaccugauccucagucagggccaccuccauuucuggaggcagacauacguucuugaugagaacuacuucuguuucuggagguggagucacauccuugcccagagccauuucuguuucugauaguggagacauguccuucaacaagcccacuucuuuuacuguggacggagccacauccuuggccggggcuauuucuguuucugggaguugagccauguccuugacuggggccaccucugcuucuaaagguagugcuuuauccuuggucaagaucacguugguuuccgggggcagugucaugucccuggccagggcuaccucuguuucugaggacaaagccaccuucucagcagaggauauuucuguggaugauauaaugucauuagccugugccaccucuauuucugagaguaauaccaaauccuuggcugggacuaucuuguuuucuuuggguggucccauguccuuggaaggagccaaguccauuuuuauaggagaugcccucucuguuucuuucuuguuuucuuuggguggucccauguccuuggaaggggcuaaguccauuuuuauaggagaugcccucucuguuucuuucaacagugucacauccuuggcuggggcuaccucuguuucugugggcaguaccacauucuuggcugaagauacaucuguuucugugggccaucugacauccuuaaccagggccacuucuuuuucuguggguaguuccauguccuugacuagggccauaucugauuccauggauggcugcauguccuuggccagugucacaucuaauuuggugggugauuccauaucuuuagccaaugccaccucgguuuuuguagcuagugccauguccuuggcgagggccaucucuguuucuuuagauggugccaugucaguagucuucagucccaucauuauuuccaaugcuugugcugguggccucucuucugaugccauuucuaucuccuuggcuagcucuaagggaacugccguuggcugaggagguucugcaacagccucuggggaaacaaaggacucugaguguggagaguuuaaggcuuccacagaccaccccugagguacaacagcuguguugcagggagacauaccguaacugucuuucaagggaucauuuuguccugcaaauauugaaguaucagcugucgcacuggagggaaagaccaaaucugccaggucaucaucaugguacaucuuaaagggaucaagcuucucuggcucaucgggcccugugccugcaaugcagcugcucuccagaccguaggugggauccacuuucccagaggcucgugcugcuucuuguacuuucuugacaugagcuucaaccaauuccagugguaccuccucccggacccgagaaaacuccuccaaagccgcuuuugcugcagcagaugccacgcgaggguccaccacagaugccaaaaaagcaacaguacucauaacuggauuuccugacugacugaaggggacaggcugguaggccaaaggcccaagggaagcaucugaauucucaagguauggguccucaaugggaagucucaaaaaguggaggaugcauucauccugaguacgacuuccaacauguuccgacacuuuguuccaaucauccuuguacaucuccagggccuccaggaguagaagggucuccuguucaguccauucucuuccagcacuagcaccuuuacucuuugcuaauguuuucuuggaguaaaugucaguacggagaccaaaguucugcaaaucaacugguuuuuccuuguuuuucucaggaaaauuuagcaucuguugagcagcaggaaccugaggugaucgaagaugcagaggcacaagcccagaggggguaucagcuaauacauuaaaaugaggaguaggaggaggucccauugccaugggucuacuuuccgggucaacuugguaauuaacgaguccccacugcucuaaaaaggcauggacccucaucacagcacacacaucuccagucaaguuccuccgacaagcagugcuaguuaaauacucuuggggguuuagacgauacgugucaaucauaaaauuucgauaugccaaguauauuucuggagucuuggauuuguuuuuuccauugaagaacucaggaagagcacgccguucaaucacaugaauacaguuauaaucaaaccaugaugcauaacuaggaauaauaaugugauuggucugcucugucacauuaucuuccccaaggucaacugaucgacucugaucaccuuuggcaggaucuucaucuuccuuuccuccugcugugacuguuucuucauccugcucaucuagauccgcuacaguuccuccuuuaacagguguauuuucacuaucuuucuuuagguucacauuuuugggaaguacuacuucuucuauauuggguacagguguugggucuuccauauccuugguuagaucuucuugcucaucuuccucuuucugacuucugcgcuucccauaaaggcuagcuuggccuuucuucccacucuucuuccgugauucuguuggugucggagggggaggcgaaggcgaauguuuccucuuucgagcauuagcugaugcuuuucuaucucuucuuucuggacuucugacuggcucuucauucuugguugaaauccgcugacgaaaacucacaggcuuccuauuuucauccaccucauaauccuccucauucauccauucauugaaaauaucaguguccaaaauccauuucacaugaaccuuccaugguuuuucuggaauugguggaucuucaauuucagcaucaacaucauuacuauggacccaaguaucauagcugucuggguaaaagccccaaugcacuaacacuugcuucucuuuucucaucaccggucucaaccauucuucaucgucuugugaggaagaauauggguaaauguggugggaagcuuuugacuucucauccguaaauguucccugaugucguuugaugauaucuuucaauuuguuagccaacuucagaucaaugucuggaaugagguagauguugggucuggucaaacaauuguucugcaccaauguuuuuucaauguucauaaacauuuccacauuacgauccauucgagauggguucuguaggucaaaccuccgccaucccuguucauuuuuauacuuguaagcagccccaagaaugugacauaaggcgccuccagcuuugaaauccaugaaacacuuugcagggaguuuggugaaggccggguuggugacaugcuucccaaaggcaucuuccuggaacugaagaagcugcaccaccagcccagccaguguuuuauugguaggagcauccgcaugaacauacuuggaauagcacguccugcggccucagccgccucuuccgccauccuccguaggcugcauucugcccuagugagcgccgguuuuu

SEQ ID NO: 2072 - RNA, 3042 nt, Homo sapiens
gagauggagcccagugcaguggcaugaucucggcucaccgcaaccuccaacuccuugguucaagcaauccuccugccucagccuccugaguagcugggauuacaggcaugcaucaccacgcccaguuaauuuuaguauuuuuaguagagaugggauuucaccauguuggucaggauggucuccaucuccugaugugauccgcccgccuuggccucccaaagugcugagauuacaggcaugagccaccaugcccggccucuacagaacauuuuuuacagauauauaagauaauagggucaaaggcugagauuuuaaaguugguuuaggccacugugguaaaugagaauacaagauauuuucuaagcauguccaaacaugaggaaggacaauaacagcucagaaaaaagaaauuucauucgugauucaagcaauaacagcagaagauacuccguuuaaaaauuauggcaguagaagauaaccaccauucuggcaccuaccuuuguuuucuucucugggcuuggugggagcuccuuguucggugggguggugaugucauuuccugucccacucaccacaggccuuccuucuucuggccuggcuauuccaagcuucucuggcucaucgggcccugugccugcaaugcagcugcucuccagaccguaggugggauccacuuucccagaggcucgugcugcuucuuguacuuucuugacaugagcuucaaccaauuccagugguaccuccucccggacccgagaaaacuccuccaaagccgcuuuugcugcagcagaugccacgcgaggguccaccacagaugccaaaaaagcaacaguacucauaacuggauuuccugacugacugaaggggacaggcugguaggccaaaggcccaagggaagcaucugaauucucaagguauggguccucaaugggaagucucaaaaaguggaggaugcauucauccugaguacgacuuccaacauguuccgacacuuuguuccaaucauccuuguacaucuccagggccuccaggaguagaagggucuccuguucaguccauucucuuccagcacuagcaccuuuacucuuugcuaauguuuucuuggaguaaaugucaguacggagaccaaaguucugcaaaucaacugguuuuuccuuguuuuucucaggaaaauuuagcaucuguugagcagcaggaaccugaggugaucgaagaugcagaggcacaagcccagaggggguaucagcuaauacauuaaaaugaggaguaggaggaggucccauugccaugggucuacuuuccgggucaacuugguaauuaacgaguccccacugcucuaaaaaggcauggacccucaucacagcacacacaucuccagucaaguuccuccgacaagcagugcuaguuaaauacucuuggggguuuagacgauacgugucaaucauaaaauuucgauaugccaaguauauuucuggagucuuggauuuguuuuuuccauugaagaacucaggaagagcacgccguucaaucacaugaauacaguuauaaucaaaccaugaugcauaacuaggaauaauaaugugauuggucugcucugucacauuaucuuccccaaggucaacugaucgacucugaucaccuuuggcaggaucuucaucuuccuuuccuccugcugugacuguuucuucauccugcucaucuagauccgcuacaguuccuccuuuaacagguguauuuucacuaucuuucuuuagguucacauuuuugggaaguacuacuucuucuauauuggguacagguguugggucuuccauauccuugguuagaucuucuugcucaucuuccucuuucugacuucugcgcuucccauaaaggcuagcuuggccuuucuucccacucuucuuccgugauucuguuggugucggagggggaggcgaaggcgaauguuuccucuuucgagcauuagcugaugcuuuucuaucucuucuuucuggacuucugacuggcucuucauucuugguugaaauccgcugacgaaaacucacaggcuuccuauuuucauccaccucauaauccuccucauucauccauucauugaaaauaucaguguccaaaauccauuucacaugaaccuuccaugguuuuucuggaauugguggaucuucaauuucagcaucaacaucauuacuauggacccaaguaucauagcugucuggguaaaagccccaaugcacuaacacuugcuucucuuuucucaucaccggucucaaccauucuucaucgucuugugaggaagaauauggguaaauguggugggaagcuuuugacuucucauccguaaauguucccugaugucguuugaugauaucuuucaauuuguuagccaacuucagaucaaugucuggaaugagguagauguugggucuggucaaacaauuguucugcaccaauguuuuuucaauguucauaaacauuuccacauuacgauccauucgagauggguucuguaggucaaaccuccgccaucccuguucauuuuuauacuuguaagcagccccaagaaugugacauaaggcgccuccagcuuugaaauccaugaaacacuuugcagggaguuuggugaaggccggguuggugacaugcuucccaaaggcaucuuccuggaacugaagaagcugcaccaccagcccagccaguguuuuauugguaggagcauccgcaugaacauacuucuuguagugcuugcccagccagacccgcaccgaauccagcugggacaccgucuccgggcucucccaaaacuugguggccgggcccccauccuuccgucgauaaacagcuaggccugcggcugccgccgcaauccccgagcccguggcgccuaccgcuguccccggcccgccgccgcccgccgcugcggccaucgucgcagcccgucguccccacagccuggcccaccccggcccucgcgguguuucccggucguucccgcgcgcacccccgcgcgcguagccgccacugccgcuucccggccccgcccag

SEQ ID NO: 2073 - RNA, 5704 nt, Homo sapiens
cugcgugaugggacaucaggcagcuuuauuuauuuacucuuaaaacuguuacaacagaaucauggacugacacagguaauggcugagccauaagcaaaucgagaaguacagaaaugucccaccccaaacagcugcggaguacacaucacacagggccucuggucccggccuucucaggugcucuggaguggaggauccuuugagggaacucugaccacuccuguugucuaccuagagagcacgccacuugggccaccuacccccaaccuuuggccaaaggagugaaaggaccuggaaccugucgucaaccucagcauccucaugaccccaggacagacgcaguggaggcagcagguacucugggccugugcuguugccccugaggugucuccugacuacgcaacccuguuuccuucccacuuucaucccagcaggcccuuucuuccugcugacaaaacacuggcucccucauguucuuggcacagcagaaguguucugcacauggucucuacggaggaaagcuggucccccuggcccaggcagcacuuccuccgugagccccugcaguuuccuggugugugcuuggggagcuagggacauggugucaaaccuccacaaggcacugcuaccucagaaagggggaggaccugucaggcccaggacagccucccugcacauggagaucaaaucuaaacuuaggucaagaccccuaccuucuccagggaugccaggaccagagaagggcagaggucaggagggggcaugaggaggccaagucuggggcagccuccucagaggcaaaucuacacugcagccaaucccccuccagagaagcccuuggaaucucccaggccauuucacuacaaacuuauguuugaauccuuuauuagaaaccaugcaaacuuuaauacaaaaaauacaagugcaauaagaaucuuugugucaauacaguucccgggauuucuccucacugcagccaucccaaggccuagcugggaugcccucugugggccuugccucuccucccuccccucuccagucagggcauaagggaagcagauagccuuagucucaugccuuuuauuuuuaaauuuccagaccugauuuccuacuaucugcaugaggcucccuuggacaugagggcuuacauguccuagggugugggugccggccugaaggaauuccaucuccuggcccuuucuuguucuccagcccuggcuuuuuauccuagggcugaccaccagaucccagggaaugggacagagaugccaaaaccagccucuugguuagaaaagaaaagcagcauacacacaacaaaauggcaaaaccaaccaguccacgcuccaagggccccuugugugccugaccggcucaccagccacagccucugcaccccucuucccugccgcaccgccuccagggcccuaagcugcccacauccuccagcggggguggcauaaggauaucuccgcccuguucccucuaacacuuacugaggacuuucauguagacauggcuucaaccugcagaacuauuuugccaguuuuuagguuauuagaaaaaaauaaaaggacaaaacaagaaaaaugugacagcagcuaggcggguauguuaagcauggggacaggcagcacugacccccaacuuggggcagggcagcaagaagggcccgacaccaccugcauggggaggggggggcgcccauuugugggaccagagggagaggcaguggcuuaagcuccacggucagcguccugucaccacucggaauccaccuccacucuucccuccagguagauccagggagaagggagggcaugucaguuucuuuuggguuuggaccaaagaaccaaaaaaagaugaggauagaaucugguucuccucuccuagaucccaacuuagccucaaccaccccaacccccucccaaccuccuccacggagcaguggcgcagugauggggcaagaccaaagcagggagaugggcccaggcuggggagugagaggagguguggggcagggcugcugcugccccgggcacgcaaagcaggagggaaggcgagccuagcgggcugcccagcacggcgcccaagcgcucacuggucuaguggacagcccgggaaagggggccaaggacccgggagcccgaguuggggccgccagggaaguguggggggcgggagacaaugucggccccguggucggugcgggcccuggcauuugcccggaacgucagccuguaggucucaauuugucuccuggaucuggcuguccaaggucugggccucccuuuggucaccacccccugacagggugggguggccauugaggccacuggcugaagugggggcgccagcuucaggcgcugccucagagauggccggcuccuccccagcagggggacccggacacagaggagccucgcugccaccgcccucagucuucacagcaccuccugcagguagguggcccacauuaucgagggaucccaccuuggccugggccuucuccuugaaguucaacuucugacuuucaaucuugacaucuccuccaccaggcuugugcuugauguuagccuuagacccacacuuggaggagaccuuagagauguccacuuucuuguucugaaucugaacccggccuccuccaggcugaugcuugauguuuuccguggagccaaccuuggagcggacauucuucagaucaggagcagaaguauugguggccaggcggcugagccggggggugguggagcuggguuuggccgaggugggcuucuugucuaugaaaggaguuguggagggccgggagggcauggguguggccuugacucggcugggaaccaccccugcagcgggggcugucccacugagaguggugguuuucuucauggaacugguggaggugcucuuugggcgacucaagucagcugguacagacuuugcagucaucuucuugacuucugcagguuuucccucagucuuaauggcagugggcuucuugggcaggagcguggaggggcuccuacugcuugggccaguugaggcaacagcagcagcuguugugguuuuugcaacagucugagugcucuuggacccagaucuggaggcuggggcagaagcuggcuuggauggugaggcccgcuucucaggagccuuugcaucugcaaugggcuuuggcuucacgucuuuugaagguaagauggaaggccuggcagaggcgacggcagggcguuuggguggggcagcuggcacuaagccugaagcaaggcucauggguuuuuuauucaacccaccaaugguggugggagcuggcugcuuagggagagaagugggcuguguuuuggcuuucgauguugaagucuuugcagguugagugguggccaaaggcuuuguuuucuucucugggcuuggugggagcuccuuguucggugggguggugaugucauuuccugucccacucaccacaggccuuccuucuucuggccuggcuauuccaagcuucucuggcucaucgggcccugugccugcaaugcagcugcucuccagaccguaggugggauccacuuucccagaggcucgugcugcuucuuguacuuucuugacaugagcuucaaccaauuccagugguaccuccucccggacccgagaaaacuccuccaaagccgcuuuugcugcagcagaugccacgcgaggguccaccacagaugccaaaaaagcaacaguacucauaacuggauuuccugacugacugaaggggacaggcugguaggccaaaggcccaagggaagcaucugaauucucaagguauggguccucaaugggaagucucaaaaaguggaggaugcauucauccugaguacgacuuccaacauguuccgacacuuuguuccaaucauccuuguacaucuccagggccuccaggaguagaagggucuccuguucaguccauucucuuccagcacuagcaccuuuacucuuugcuaauguuuucuuggaguaaaugucaguacggagaccaaaguucugcaaaucaacugguuuuuccuuguuuuucucaggaaaauuuagcaucuguugagcagcaggaaccugaggugaucgaagaugcagaggcacaagcccagaggggguaucagcuaauacauuaaaaugaggaguaggaggaggucccauugccaugggucuacuuuccgggucaacuugguaauuaacgaguccccacugcucuaaaaaggcauggacccucaucacagcacacacaucuccagucaaguuccuccgacaagcagugcuaguuaaauacucuuggggguuuagacgauacgugucaaucauaaaauuucgauaugccaaguauauuucuggagucuuggauuuguuuuuuccauugaagaacucaggaagagcacgccguucaaucacaugaauacaguuauaaucaaaccaugaugcauaacuaggaauaauaaugugauuggucugcucugucacauuaucuuccccaaggucaacugaucgacucugaucaccuuuggcaggaucuucaucuuccuuuccuccugcugugacuguuucuucauccugcucaucuagauccgcuacaguuccuccuuuaacagguguauuuucacuaucuuucuuuagguucacauuuuugggaaguacuacuucuucuauauuggguacagguguugggucuuccauauccuugguuagaucuucuugcucaucuuccucuuucugacuucugcgcuucccauaaaggcuagcuuggccuuucuucccacucuucuuccgugauucuguuggugucggagggggaggcgaaggcgaauguuuccucuuucgagcauuagcugaugcuuuucuaucucuucuuucuggacuucugacuggcucuucauucuugguugaaauccgcugacgaaaacucacaggcuuccuauuuucauccaccucauaauccuccucauucauccauucauugaaaauaucaguguccaaaauccauuucacaugaaccuuccaugguuuuucuggaauugguggaucuucaauuucagcaucaacaucauuacuauggacccaaguaucauagcugucuggguaaaagccccaaugcacuaacacuugcuucucuuuucucaucaccggucucaaccauucuucaucgucuugugaggaagaauauggguaaauguggugggaagcuuuugacuucucauccguaaauguucccugaugucguuugaugauaucuuucaauuuguuagccaacuucagaucaaugucuggaaugagguagauguugggucuggucaaacaauuguucugcaccaauguuuuuucaauguucauaaacauuuccacauuacgauccauucgagauggguucuguaggucaaaccuccgccaucccuguucauuuuuauacuuguaagcagccccaagaaugugacauaaggcgccuccagcuuugaaauccaugaaacacuuugcagggaguuuggugaaggccggguuggugacaugcuucccaaaggcaucuuccuggaacugaagaagcugcaccaccagcccagccaguguuuuauugguaggagcauccgcaugaacauacuuggaauagcacguccugcggccucagccgccucuuccgccauccuccguaggcugcauucugcccuagugagcgccgguuuuu

SEQ ID NO: 2074 - RNA, 2814 nt, Homo sapiens
gagauggagcccagugcaguggcaugaucucggcucaccgcaaccuccaacuccuugguucaagcaauccuccugccucagccuccugaguagcugggauuacaggcaugcaucaccacgcccaguuaauuuuaguauuuuuaguagagaugggauuucaccauguuggucaggauggucuccaucuccugaugugauccgcccgccuuggccucccaaagugcugagauuacaggcaugagccaccaugcccggccucuacagaacauuuuuuacagauauauaagauaauagggucaaaggcugagauuuuaaaguugguuuaggccacugugguaaaugagaauacaagauauuuucuaagcauguccaaacaugaggaaggacaauaacagcucagaaaaaagaaauuucauucgugauucaagcaauaacagcagaagauacuccguuuaaaaauuauggcaguagaagauaaccaccauucuggcaccuaccuuuguuuucuucucugggcuuggugggagcuccuuguucggugggguggugaugucauuuccugucccacucaccacaggccuuccuucuucuggccuggcuauuccaagcuucucuggcucaucgggcccugugccugcaaugcagcugcucuccagaccguaggugggauccacuuucccagaggcucgugcugcuucuuguacuuucuugacaugagcuucaaccaauuccagugguaccuccucccggacccgagaaaacuccuccaaagccgcuuuugcugcagcagaugccacgcgaggguccaccacagaugccaaaaaagcaacaguacucauaacuggauuuccugacugacugaaggggacaggcugguaggccaaaggcccaagggaagcaucugaauucucaagguauggguccucaaugggaagucucaaaaaguggaggaugcauucauccugaguacgacuuccaacauguuccgacacuuuguuccaaucauccuuguacaucuccagggccuccaggaguagaagggucuccuguucaguccauucucuuccagcacuagcaccuuuacucuuugcuaauguuuucuuggaguaaaugucaguacggagaccaaaguucugcaaaucaacugguuuuuccuuguuuuucucaggaaaauuuagcaucuguugagcagcaggaaccugaggugaucgaagaugcagaggcacaagcccagaggggguaucagcuaauacauuaaaaugaggaguaggaggaggucccauugccaugggucuacuuuccgggucaacuugguaauuaacgaguccccacugcucuaaaaaggcauggacccucaucacagcacacacaucuccagucaaguuccuccgacaagcagugcuaguuaaauacucuuggggguuuagacgauacgugucaaucauaaaauuucgauaugccaaguauauuucuggagucuuggauuuguuuuuuccauugaagaacucaggaagagcacgccguucaaucacaugaauacaguuauaaucaaaccaugaugcauaacuaggaauaauaaugugauuggucugcucugucacauuaucuuccccaaggucaacugaucgacucugaucaccuuuggcaggaucuucaucuuccuuuccuccugcugugacuguuucuucauccugcucaucuagauccgcuacaguuccuccuuuaacagguguauuuucacuaucuuucuuuagguucacauuuuugggaaguacuacuucuucuauauuggguacagguguugggucuuccauauccuugguuagaucuucuugcucaucuuccucuuucugacuucugcgcuucccauaaaggcuagcuuggccuuucuucccacucuucuuccgugauucuguuggugucggagggggaggcgaaggcgaauguuuccucuuucgagcauuagcugaugcuuuucuaucucuucuuucuggacuucugacuggcucuucauucuugguugaaauccgcugacgaaaacucacaggcuuccuauuuucauccaccucauaauccuccucauucauccauucauugaaaauaucaguguccaaaauccauuucacaugaaccuuccaugguuuuucuggaauugguggaucuucaauuucagcaucaacaucauuacuauggacccaaguaucauagcugucuggguaaaagccccaaugcacuaacacuugcuucucuuuucucaucaccggucucaaccauucuucaucgucuugugaggaagaauauggguaaauguggugggaagcuuuugacuucucauccguaaauguucccugaugucguuugaugauaucuuucaauuuguuagccaacuucagaucaaugucuggaaugagguagauguugggucuggucaaacaauuguucugcaccaauguuuuuucaauguucauaaacauuuccacauuacgauccauucgagauggguucuguaggucaaaccuccgccaucccuguucauuuuuauacuuguaagcagccccaagaaugugacauaaggcgccuccagcuuugaaauccaugaaacacuuugcagggaguuuggugaaggccggguuggugacaugcuucccaaaggcaucuuccuggaacugaagaagcugcaccaccagcccagccaguguuuuauugguaggagcauccgcaugaacauacuuggaauagcacguccugcggccucagccgccucuuccgccauccuccguaggcugcauucugcccuagugagcgccgguuuuu

SEQ ID NO: 2075 - RNA, 4345 nt, Homo sapiens
cuuuggcuucacgucuuuugaagguaagauggaaggccuggcagaggcgacggcagggcguuuggguggggcagcuggcacuaagccugaagcaaggcucauggguuuuuuauucaacccaccaaugguggugggagcuggcugcuuagggagagaagugggcuguguuuuggcuuucgauguugaagucuuugcagguugagugguggccaaaggcuuuguuuucuucucugggcuuggugggagcuccuuguucggugggguggugaugucauuuccugucccacucaccacaggccuuccuucuucuggccuggcuauuccugaggucucugaagaaagcucagaagguugacuguugcaugguuuccuuuccccuaguuuuucuaacacagaauccuccucggccggcaagcugcacuuuuuccccguuccugugacgguuucuggugaaaucaugaaaguaggugcagcugacugccccacauccugcagagauucuaaaugggaauccucacuuauuccuuuuuguguuugugcaauuuccaugucuuuaauuggaacugguguugccucuguuucugagagugguggaacaucuuuggcuggagucacauuguuggccagggucagaaccccauccuuagccaggggugcuucuguuuugagggcugggaccugauccucagucagggccaccuccauuucuggaggcagacauacguucuugaugagaacuacuucuguuucuggagguggagucacauccuugcccagagccauuucuguuucugauaguggagacauguccuucaacaagcccacuucuuuuacuguggacggagccacauccuuggccggggcuauuucuguuucugggaguugagccauguccuugacuggggccaccucugcuucuaaagguagugcuuuauccuuggucaagaucacguugguuuccgggggcagugucaugucccuggccagggcuaccucuguuucugaggacaaagccaccuucucagcagaggauauuucuguggaugauauaaugucauuagccugugccaccucuauuucugagaguaauaccaaauccuuggcugggacuaucuuguuuucuuuggguggucccauguccuuggaaggagccaaguccauuuuuauaggagaugcccucucuguuucuuucuuguuuucuuuggguggucccauguccuuggaaggggcuaaguccauuuuuauaggagaugcccucucuguuucuuucaacagugucacauccuuggcuggggcuaccucuguuucugugggcaguaccacauucuuggcugaagauacaucuguuucugugggccaucugacauccuuaaccagggccacuucuuuuucuguggguaguuccauguccuugacuagggccauaucugauuccauggauggcugcauguccuuggccagugucacaucuaauuuggugggugauuccauaucuuuagccaaugccaccucgguuuuuguagcuagugccauguccuuggcgagggccaucucuguuucuuuagauggugccaugucaguagucuucagucccaucauuauuuccaaugcuugugcugguggccucucuucugaugccauuucuaucuccuuggcuagcucuaagggaacugccguuggcugaggagguucugcaacagccucuggggaaacaaaggacucugaguguggagaguuuaaggcuuccacagaccaccccugagguacaacagcuguguugcagggagacauaccguaacugucuuucaagggaucauuuuguccugcaaauauugaaguaucagcugucgcacuggagggaaagaccaaaucugccaggucaucaucaugguacaucuuaaagggaucaagcuucucuggcucaucgggcccugugccugcaaugcagcugcucuccagaccguaggugggauccacuuucccagaggcucgugcugcuucuuguacuuucuugacaugagcuucaaccaauuccagugguaccuccucccggacccgagaaaacuccuccaaagccgcuuuugcugcagcagaugccacgcgaggguccaccacagaugccaaaaaagcaacaguacucauaacuggauuuccugacugacugaaggggacaggcugguaggccaaaggcccaagggaagcaucugaauucucaagguauggguccucaaugggaagucucaaaaaguggaggaugcauucauccugaguacgacuuccaacauguuccgacacuuuguuccaaucauccuuguacaucuccagggccuccaggaguagaagggucuccuguucaguccauucucuuccagcacuagcaccuuuacucuuugcuaauguuuucuuggaguaaaugucaguacggagaccaaaguucugcaaaucaacugguuuuuccuuguuuuucucaggaaaauuuagcaucuguugagcagcaggaaccugaggugaucgaagaugcagaggcacaagcccagaggggguaucagcuaauacauuaaaaugaggaguaggaggaggucccauugccaugggucuacuuuccgggucaacuugguaauuaacgaguccccacugcucuaaaaaggcauggacccucaucacagcacacacaucuccagucaaguuccuccgacaagcagugcuaguuaaauacucuuggggguuuagacgauacgugucaaucauaaaauuucgauaugccaaguauauuucuggagucuuggauuuguuuuuuccauugaagaacucaggaagagcacgccguucaaucacaugaauacaguuauaaucaaaccaugaugcauaacuaggaauaauaaugugauuggucugcucugucacauuaucuuccccaaggucaacugaucgacucugaucaccuuuggcaggaucuucaucuuccuuuccuccugcugugacuguuucuucauccugcucaucuagauccgcuacaguuccuccuuuaacagguguauuuucacuaucuuucuuuagguucacauuuuugggaaguacuacuucuucuauauuggguacagguguugggucuuccauauccuugguuagaucuucuugcucaucuuccucuuucugacuucugcgcuucccauaaaggcuagcuuggccuuucuucccacucuucuuccgugauucuguuggugucggagggggaggcgaaggcgaauguuuccucuuucgagcauuagcugaugcuuuucuaucucuucuuucuggacuucugacuggcucuucauucuugguugaaauccgcugacgaaaacucacaggcuuccuauuuucauccaccucauaauccuccucauucauccauucauugaaaauaucaguguccaaaauccauuucacaugaaccuuccaugguuuuucuggaauugguggaucuucaauuucagcaucaacaucauuacuauggacccaaguaucauagcugucuggguaaaagccccaaugcacuaacacuugcuucucuuuucucaucaccggucucaaccauucuucaucgucuugugaggaagaauauggguaaauguggugggaagcuuuugacuucucauccguaaauguucccugaugucguuugaugauaucuuucaauuuguuagccaacuucagaucaaugucuggaaugagguagauguugggucuggucaaacaauuguucugcaccaauguuuuuucaauguucauaaacauuuccacauuacgauccauucgagauggguucuguaggucaaaccuccgccaucccuguucauuuuuauacuuguaagcagccccaagaaugugacauaaggcgccuccagcuuugaaauccaugaaacacuuugcagggaguuuggugaaggccggguuggugacaugcuucccaaaggcaucuuccuggaacugaagaagcugcaccaccagcccagccaguguuuuauugguaggagcauccgcaugaacauacuucuuguagugcuugcccagccagacccgcaccgaauccagcugggacaccgucuccgggcucucccaaaacuugguggccgggcccccauccuuccgucgauaaacagcuaggccugcggcugccgccgcaauccccgagcccguggcgccuaccgcuguccccggcccgccgccgcccgccgcugcggccaucgucgcagcccgucguccccacagccuggcccaccccggcccucgcgguguuucccggucguucccgcgcgcacccccgcgcgcguagccgccacugccgcuucccggccccgcccag

SEQ ID NO: 2076 - RNA, 3168 nt, Homo sapiens
cugcgugaugggacaucaggcagcuuuauuuauuuacucuuaaaacuguuacaacagaaucauggacugacacagguaauggcugagccauaagcaaaucgagaaguacagaaaugucccaccccaaacagcugcggaguacacaucacacagggccucuggucccggccuucucaggugcucuggaguggaggauccuuugagggaacucugaccacuccuguugucuaccuagagagcacgccacuugggccaccuacccccaaccuuuggccaaaggagugaaaggaccuggaaccugucgucaaccucagcauccucaugaccccaggacagacgcaguggaggcagcagguacucugggccugugcuguugccccugaggugucuccugacuacgcaacccuguuuccuucccacuuucaucccagcaggcccuuucuuccugcugacaaaacacuggcucccucauguucuuggcacagcagaaguguucugcacauggucucuacggaggaaagcuggucccccuggcccaggcagcacuuccuccgugagccccugcaguuuccuggugugugcuuggggagcuagggacauggugucaaaccuccacaaggcacugcuaccucagaaagggggaggaccugucaggcccaggacagccucccugcacauggagaucaaaucuaaacuuaggucaagaccccuaccuucuccagggaugccaggaccagagaagggcagaggucaggagggggcaugaggaggccaagucuggggcagccuccucagaggcaaaucuacacugcagccaaucccccuccagagaagcccuuggaaucucccaggccauuucacuacaaacuuauguuugaauccuuuauuagaaaccaugcaaacuuuaauacaaaaaauacaagugcaauaagaaucuuugugucaauacaguucccgggauuucuccucacugcagccaucccaaggccuagcugggaugcccucugugggccuugccucuccucccuccccucuccagucagggcauaagggaagcagauagccuuagucucaugccuuuuauuuuuaaauuuccagaccugauuuccuacuaucugcaugaggcucccuuggacaugagggcuuacauguccuagggugugggugccggccugaaggaauuccaucuccuggcccuuucuuguucuccagcccuggcuuuuuauccuagggcugaccaccagaucccagggaaugggacagagaugccaaaaccagccucuugguuagaaaagaaaagcagcauacacacaacaaaauggcaaaaccaaccaguccacgcuccaagggccccuugugugccugaccggcucaccagccacagccucugcaccccucuucccugccgcaccgccuccagggcccuaagcugcccacauccuccagcggggguggcauaaggauaucuccgcccuguucccucuaacacuuacugaggacuuucauguagacauggcuucaaccugcagaacuauuuugccaguuuuuagguuauuagaaaaaaauaaaaggacaaaacaagaaaaaugugacagcagcuaggcggguauguuaagcauggggacaggcagcacugacccccaacuuggggcagggcagcaagaagggcccgacaccaccugcauggggaggggggggcgcccauuugugggaccagagggagaggcaguggcuuaagcuccacggucagcguccugucaccacucggaauccaccuccacucuucccuccagguagauccagggagaagggagggcaugucaguuucuuuuggguuuggaccaaagaaccaaaaaaagaugaggauagaaucugguucuccucuccuagaucccaacuuagccucaaccaccccaacccccucccaaccuccuccacggagcaguggcgcagugauggggcaagaccaaagcagggagaugggcccaggcuggggagugagaggagguguggggcagggcugcugcugccccgggcacgcaaagcaggagggaaggcgagccuagcgggcugcccagcacggcgcccaagcgcucacuggucuaguggacagcccgggaaagggggccaaggacccgggagcccgaguuggggccgccagggaaguguggggggcgggagacaaugucggccccguggucggugcgggcccuggcauuugcccggaacgucagccuguaggucucaaucugcagugacaugggaggagggaagggagaggggaacaggggagacaagaggggaacacgggggagacggaagacgagaccagaaugucaucauuagaugcuugucuccuggaucuggcuguccaaggucugggccucccuuuggucaccacccccugacagggugggguggccauugaggccacuggcugaagugggggcgccagcuucaggcgcugccucagagauggccggcuccuccccagcagggggacccggacacagaggagccucgcugccaccgcccucagucuucacagcaccuccugcagguagguggcccacauuaucgagggaucccaccuuggccugggccuucuccuugaaguucaacuucugacuuucaaucuugacaucuccuccaccaggcuugugcuugauguuagccuuagacccacacuuggaggagaccuuagagauguccacuuucuuguucugaaucugaacagggaguuuggugaaggccggguuggugacaugcuucccaaaggcaucuuccuggaacugaagaagcugcaccaccagcccagccaguguuuuauugguaggagcauccgcaugaacauacuucuuguagugcuugcccagccagacccgcaccgaauccagcugggacaccgucuccgggcucucccaaaacuugguggccgggcccccauccuuccgucgauaaacagcuaggccugcggcugccgccgcaauccccgagcccguggcgccuaccgcuguccccggcccgccgccgcccgccgcugcggccaucgucgcagcccgucguccccacagccuggcccaccccggcccucgcgguguuucccggucguucccgcgcgcacccccgcgcgcguagccgccacugccgcuucccggccccgcccag

SEQ ID NO: 2077 - RNA, 5949 nt, Homo sapiens
cugcgugaugggacaucaggcagcuuuauuuauuuacucuuaaaacuguuacaacagaaucauggacugacacagguaauggcugagccauaagcaaaucgagaaguacagaaaugucccaccccaaacagcugcggaguacacaucacacagggccucuggucccggccuucucaggugcucuggaguggaggauccuuugagggaacucugaccacuccuguugucuaccuagagagcacgccacuugggccaccuacccccaaccuuuggccaaaggagugaaaggaccuggaaccugucgucaaccucagcauccucaugaccccaggacagacgcaguggaggcagcagguacucugggccugugcuguugccccugaggugucuccugacuacgcaacccuguuuccuucccacuuucaucccagcaggcccuuucuuccugcugacaaaacacuggcucccucauguucuuggcacagcagaaguguucugcacauggucucuacggaggaaagcuggucccccuggcccaggcagcacuuccuccgugagccccugcaguuuccuggugugugcuuggggagcuagggacauggugucaaaccuccacaaggcacugcuaccucagaaagggggaggaccugucaggcccaggacagccucccugcacauggagaucaaaucuaaacuuaggucaagaccccuaccuucuccagggaugccaggaccagagaagggcagaggucaggagggggcaugaggaggccaagucuggggcagccuccucagaggcaaaucuacacugcagccaaucccccuccagagaagcccuuggaaucucccaggccauuucacuacaaacuuauguuugaauccuuuauuagaaaccaugcaaacuuuaauacaaaaaauacaagugcaauaagaaucuuugugucaauacaguucccgggauuucuccucacugcagccaucccaaggccuagcugggaugcccucugugggccuugccucuccucccuccccucuccagucagggcauaagggaagcagauagccuuagucucaugccuuuuauuuuuaaauuuccagaccugauuuccuacuaucugcaugaggcucccuuggacaugagggcuuacauguccuagggugugggugccggccugaaggaauuccaucuccuggcccuuucuuguucuccagcccuggcuuuuuauccuagggcugaccaccagaucccagggaaugggacagagaugccaaaaccagccucuugguuagaaaagaaaagcagcauacacacaacaaaauggcaaaaccaaccaguccacgcuccaagggccccuugugugccugaccggcucaccagccacagccucugcaccccucuucccugccgcaccgccuccagggcccuaagcugcccacauccuccagcggggguggcauaaggauaucuccgcccuguucccucuaacacuuacugaggacuuucauguagacauggcuucaaccugcagaacuauuuugccaguuuuuagguuauuagaaaaaaauaaaaggacaaaacaagaaaaaugugacagcagcuaggcggguauguuaagcauggggacaggcagcacugacccccaacuuggggcagggcagcaagaagggcccgacaccaccugcauggggaggggggggcgcccauuugugggaccagagggagaggcaguggcuuaagcuccacggucagcguccugucaccacucggaauccaccuccacucuucccuccagguagauccagggagaagggagggcaugucaguuucuuuuggguuuggaccaaagaaccaaaaaaagaugaggauagaaucugguucuccucuccuagaucccaacuuagccucaaccaccccaacccccucccaaccuccuccacggagcaguggcgcagugauggggcaagaccaaagcagggagaugggcccaggcuggggagugagaggagguguggggcagggcugcugcugccccgggcacgcaaagcaggagggaaggcgagccuagcgggcugcccagcacggcgcccaagcgcucacuggucuaguggacagcccgggaaagggggccaaggacccgggagcccgaguuggggccgccagggaaguguggggggcgggagacaaugucggccccguggucggugcgggcccuggcauuugcccggaacgucagccuguaggucucaaucuucacagcaccuccugcagguagguggcccacauuaucgagggaucccaccuuggccugggccuucuccuugaaguucaacuucugacuuucaaucuugacaucuccuccaccaggcuugugcuugauguuagccuuagacccacacuuggaggagaccuuagagauguccacuuucuuguucugaaucugaacauuaccaccuccagggacaugcuuaauauuguccuuggaaccacacuuggacugaauauggcuguagcucacuuuuuuggagacuaucuggacuuuccccgcagguuguuucugugcacuugcaauugggccggcuguuuuagugacugcauuagauucaggcuuucggguuguagcagcugccucuguuuuuuucucuacuuuggcccggccuccuccaggcugaugcuugauguuuuccguggagccaaccuuggagcggacauucuucagaucaggagcagaaguauugguggccaggcggcugagccggggggugguggagcuggguuuggccgaggugggcuucuugucuaugaaaggaguuguggagggccgggagggcauggguguggccuugacucggcugggaaccaccccugcagcgggggcugucccacugagaguggugguuuucuucauggaacugguggaggugcucuuugggcgacucaagucagcugguacagacuuugcagucaucuucuugacuucugcagguuuucccucagucuuaauggcagugggcuucuugggcaggagcguggaggggcuccuacugcuugggccaguugaggcaacagcagcagcuguugugguuuuugcaacagucugagugcucuuggacccagaucuggaggcuggggcagaagcuggcuuggauggugaggcccgcuucucaggagccuuugcaucugcaaugggcuuuggcuucacgucuuuugaagguaagauggaaggccuggcagaggcgacggcagggcguuuggguggggcagcuggcacuaagccugaagcaaggcucauggguuuuuuauucaacccaccaaugguggugggagcuggcugcuuagggagagaagugggcuguguuuuggcuuucgauguugaagucuuugcagguugagugguggccaaaggcuuuguuuucuucucugggcuuggugggagcuccuuguucggugggguggugaugucauuuccugucccacucaccacaggccuuccuucuucuggccuggcuauuccaagcuucucuggcucaucgggcccugugccugcaaugcagcugcucuccagaccguaggugggauccacuuucccagaggcucgugcugcuucuuguacuuucuugacaugagcuucaaccaauuccagugguaccuccucccggacccgagaaaacuccuccaaagccgcuuuugcugcagcagaugccacgcgaggguccaccacagaugccaaaaaagcaacaguacucauaacuggauuuccugacugacugaaggggacaggcugguaggccaaaggcccaagggaagcaucugaauucucaagguauggguccucaaugggaagucucaaaaaguggaggaugcauucauccugaguacgacuuccaacauguuccgacacuuuguuccaaucauccuuguacaucuccagggccuccaggaguagaagggucuccuguucaguccauucucuuccagcacuagcaccuuuacucuuugcuaauguuuucuuggaguaaaugucaguacggagaccaaaguucugcaaaucaacugguuuuuccuuguuuuucucaggaaaauuuagcaucuguugagcagcaggaaccugaggugaucgaagaugcagaggcacaagcccagaggggguaucagcuaauacauuaaaaugaggaguaggaggaggucccauugccaugggucuacuuuccgggucaacuugguaauuaacgaguccccacugcucuaaaaaggcauggacccucaucacagcacacacaucuccagucaaguuccuccgacaagcagugcuaguuaaauacucuuggggguuuagacgauacgugucaaucauaaaauuucgauaugccaaguauauuucuggagucuuggauuuguuuuuuccauugaagaacucaggaagagcacgccguucaaucacaugaauacaguuauaaucaaaccaugaugcauaacuaggaauaauaaugugauuggucugcucugucacauuaucuuccccaaggucaacugaucgacucugaucaccuuuggcaggaucuucaucuuccuuuccuccugcugugacuguuucuucauccugcucaucuagauccgcuacaguuccuccuuuaacagguguauuuucacuaucuuucuuuagguucacauuuuugggaaguacuacuucuucuauauuggguacagguguugggucuuccauauccuugguuagaucuucuugcucaucuuccucuuucugacuucugcgcuucccauaaaggcuagcuuggccuuucuucccacucuucuuccgugauucuguuggugucggagggggaggcgaaggcgaauguuuccucuuucgagcauuagcugaugcuuuucuaucucuucuuucuggacuucugacuggcucuucauucuugguugaaauccgcugacgaaaacucacaggcuuccuauuuucauccaccucauaauccuccucauucauccauucauugaaaauaucaguguccaaaauccauuucacaugaaccuuccaugguuuuucuggaauugguggaucuucaauuucagcaucaacaucauuacuauggacccaaguaucauagcugucuggguaaaagccccaaugcacuaacacuugcuucucuuuucucaucaccggucucaaccauucuucaucgucuugugaggaagaauauggguaaauguggugggaagcuuuugacuucucauccguaaauguucccugaugucguuugaugauaucuuucaauuuguuagccaacuucagaucaaugucuggaaugagguagauguugggucuggucaaacaauuguucugcaccaauguuuuuucaauguucauaaacauuuccacauuacgauccauucgagauggguucuguaggucaaaccuccgccaucccuguucauuuuuauacuuguaagcagccccaagaaugugacauaaggcgccuccagcuuugaaauccaugaaacacuuugcagggaguuuggugaaggccggguuggugacaugcuucccaaaggcaucuuccuggaacugaagaagcugcaccaccagcccagccaguguuuuauugguaggagcauccgcaugaacauacuucuuguagugcuugcccagccagacccgcaccgaauccagcugggacaccgucuccgggcucucccaaaacuugguggccgggcccccauccuuccgucgauaaacagcuaggccugcggcugccgccgcaauccccgagcccguggcgccuaccgcuguccccggcccgccgccgcccgccgcugcggccaucgucgcagcccgucguccccacagccuggcccaccccggcccucgcgguguuucccggucguucccgcgcgcacccccgcgcgcguagccgccacugccgcuucccggccccgcccag

SEQ ID NO: 2078 - RNA, 7824 nt, Homo sapiens
cugcgugaugggacaucaggcagcuuuauuuauuuacucuuaaaacuguuacaacagaaucauggacugacacagguaauggcugagccauaagcaaaucgagaaguacagaaaugucccaccccaaacagcugcggaguacacaucacacagggccucuggucccggccuucucaggugcucuggaguggaggauccuuugagggaacucugaccacuccuguugucuaccuagagagcacgccacuugggccaccuacccccaaccuuuggccaaaggagugaaaggaccuggaaccugucgucaaccucagcauccucaugaccccaggacagacgcaguggaggcagcagguacucugggccugugcuguugccccugaggugucuccugacuacgcaacccuguuuccuucccacuuucaucccagcaggcccuuucuuccugcugacaaaacacuggcucccucauguucuuggcacagcagaaguguucugcacauggucucuacggaggaaagcuggucccccuggcccaggcagcacuuccuccgugagccccugcaguuuccuggugugugcuuggggagcuagggacauggugucaaaccuccacaaggcacugcuaccucagaaagggggaggaccugucaggcccaggacagccucccugcacauggagaucaaaucuaaacuuaggucaagaccccuaccuucuccagggaugccaggaccagagaagggcagaggucaggagggggcaugaggaggccaagucuggggcagccuccucagaggcaaaucuacacugcagccaaucccccuccagagaagcccuuggaaucucccaggccauuucacuacaaacuuauguuugaauccuuuauuagaaaccaugcaaacuuuaauacaaaaaauacaagugcaauaagaaucuuugugucaauacaguucccgggauuucuccucacugcagccaucccaaggccuagcugggaugcccucugugggccuugccucuccucccuccccucuccagucagggcauaagggaagcagauagccuuagucucaugccuuuuauuuuuaaauuuccagaccugauuuccuacuaucugcaugaggcucccuuggacaugagggcuuacauguccuagggugugggugccggccugaaggaauuccaucuccuggcccuuucuuguucuccagcccuggcuuuuuauccuagggcugaccaccagaucccagggaaugggacagagaugccaaaaccagccucuugguuagaaaagaaaagcagcauacacacaacaaaauggcaaaaccaaccaguccacgcuccaagggccccuugugugccugaccggcucaccagccacagccucugcaccccucuucccugccgcaccgccuccagggcccuaagcugcccacauccuccagcggggguggcauaaggauaucuccgcccuguucccucuaacacuuacugaggacuuucauguagacauggcuucaaccugcagaacuauuuugccaguuuuuagguuauuagaaaaaaauaaaaggacaaaacaagaaaaaugugacagcagcuaggcggguauguuaagcauggggacaggcagcacugacccccaacuuggggcagggcagcaagaagggcccgacaccaccugcauggggaggggggggcgcccauuugugggaccagagggagaggcaguggcuuaagcuccacggucagcguccugucaccacucggaauccaccuccacucuucccuccagguagauccagggagaagggagggcaugucaguuucuuuuggguuuggaccaaagaaccaaaaaaagaugaggauagaaucugguucuccucuccuagaucccaacuuagccucaaccaccccaacccccucccaaccuccuccacggagcaguggcgcagugauggggcaagaccaaagcagggagaugggcccaggcuggggagugagaggagguguggggcagggcugcugcugccccgggcacgcaaagcaggagggaaggcgagccuagcgggcugcccagcacggcgcccaagcgcucacuggucuaguggacagcccgggaaagggggccaaggacccgggagcccgaguuggggccgccagggaaguguggggggcgggagacaaugucggccccguggucggugcgggcccuggcauuugcccggaacgucagccuguaggucucaaucugcagugacaugggaggagggaagggagaggggaacaggggagacaagaggggaacacgggggagacggaagacgagaccagaaugucaucauuagaugcuugucuccuggaucuggcuguccaaggucugggccucccuuuggucaccacccccugacagggugggguggccauugaggccacuggcugaagugggggcgccagcuucaggcgcugccucagagauggccggcuccuccccagcagggggacccggacacagaggagccucgcugccaccgcccucagucuucacagcaccuccugcagguagguggcccacauuaucgagggaucccaccuuggccugggccuucuccuugaaguucaacuucugacuuucaaucuugacaucuccuccaccaggcuugugcuugauguuagccuuagacccacacuuggaggagaccuuagagauguccacuuucuuguucugaaucugaacauuaccaccuccagggacaugcuuaauauuguccuuggaaccacacuuggacugaauauggcuguagcucacuuuuuuggagacuaucuggacuuuccccgcagguuguuucugugcacuugcaauugggccggcuguuuuagugacugcauuagauucaggcuuucggguuguagcagcugccucuguuuuuuucucuacuuuggcccggccuccuccaggcugaugcuugauguuuuccguggagccaaccuuggagcggacauucuucagaucaggagcagaaguauugguggccaggcggcugagccggggggugguggagcuggguuuggccgaggugggcuucuugucuaugaaaggaguuguggagggccgggagggcauggguguggccuugacucggcugggaaccaccccugcagcgggggcugucccacugagaguggugguuuucuucauggaacugguggaggugcucuuugggcgacucaagucagcugguacagacuuugcagucaucuucuugacuucugcagguuuucccucagucuuaauggcagugggcuucuugggcaggagcguggaggggcuccuacugcuugggccaguugaggcaacagcagcagcuguugugguuuuugcaacagucugagugcucuuggacccagaucuggaggcuggggcagaagcuggcuuggauggugaggcccgcuucucaggagccuuugcaucugcaaugggcuuuggcuucacgucuuuugaagguaagauggaaggccuggcagaggcgacggcagggcguuuggguggggcagcuggcacuaagccugaagcaaggcucauggguuuuuuauucaacccaccaaugguggugggagcuggcugcuuagggagagaagugggcuguguuuuggcuuucgauguugaagucuuugcagguugagugguggccaaaggcuuuguuuucuucucugggcuuggugggagcuccuuguucggugggguggugaugucauuuccugucccacucaccacaggccuuccuucuucuggccuggcuauuccugaggucucugaagaaagcucagaagguugacuguugcaugguuuccuuuccccuaguuuuucuaacacagaauccuccucggccggcaagcugcacuuuuuccccguuccugugacgguuucuggugaaaucaugaaaguaggugcagcugacugccccacauccugcagagauucuaaaugggaauccucacuuauuccuuuuuguguuugugcaauuuccaugucuuuaauuggaacugguguugccucuguuucugagagugguggaacaucuuuggcuggagucacauuguuggccagggucagaaccccauccuuagccaggggugcuucuguuuugagggcugggaccugauccucagucagggccaccuccauuucuggaggcagacauacguucuugaugagaacuacuucuguuucuggagguggagucacauccuugcccagagccauuucuguuucugauaguggagacauguccuucaacaagcccacuucuuuuacuguggacggagccacauccuuggccggggcuauuucuguuucugggaguugagccauguccuugacuggggccaccucugcuucuaaagguagugcuuuauccuuggucaagaucacguugguuuccgggggcagugucaugucccuggccagggcuaccucuguuucugaggacaaagccaccuucucagcagaggauauuucuguggaugauauaaugucauuagccugugccaccucuauuucugagaguaauaccaaauccuuggcugggacuaucuuguuuucuuuggguggucccauguccuuggaaggagccaaguccauuuuuauaggagaugcccucucuguuucuuucuuguuuucuuuggguggucccauguccuuggaaggggcuaaguccauuuuuauaggagaugcccucucuguuucuuucaacagugucacauccuuggcuggggcuaccucuguuucugugggcaguaccacauucuuggcugaagauacaucuguuucugugggccaucugacauccuuaaccagggccacuucuuuuucuguggguaguuccauguccuugacuagggccauaucugauuccauggauggcugcauguccuuggccagugucacaucuaauuuggugggugauuccauaucuuuagccaaugccaccucgguuuuuguagcuagugccauguccuuggcgagggccaucucuguuucuuuagauggugccaugucaguagucuucagucccaucauuauuuccaaugcuugugcugguggccucucuucugaugccauuucuaucuccuuggcuagcucuaagggaacugccguuggcugaggagguucugcaacagccucuggggaaacaaaggacucugaguguggagaguuuaaggcuuccacagaccaccccugagguacaacagcuguguugcagggagacauaccguaacugucuuucaagggaucauuuuguccugcaaauauugaaguaucagcugucgcacuggagggaaagaccaaaucugccaggucaucaucaugguacaucuuaaagggaucaagcuucucuggcucaucgggcccugugccugcaaugcagcugcucuccagaccguaggugggauccacuuucccagaggcucgugcugcuucuuguacuuucuugacaugagcuucaaccaauuccagugguaccuccucccggacccgagaaaacuccuccaaagccgcuuuugcugcagcagaugccacgcgaggguccaccacagaugccaaaaaagcaacaguacucauaacuggauuuccugacugacugaaggggacaggcugguaggccaaaggcccaagggaagcaucugaauucucaagguauggguccucaaugggaagucucaaaaaguggaggaugcauucauccugaguacgacuuccaacauguuccgacacuuuguuccaaucauccuuguacaucuccagggccuccaggaguagaagggucuccuguucaguccauucucuuccagcacuagcaccuuuacucuuugcuaauguuuucuuggaguaaaugucaguacggagaccaaaguucugcaaaucaacugguuuuuccuuguuuuucucaggaaaauuuagcaucuguugagcagcaggaaccugaggugaucgaagaugcagaggcacaagcccagaggggguaucagcuaauacauuaaaaugaggaguaggaggaggucccauugccaugggucuacuuuccgggucaacuugguaauuaacgaguccccacugcucuaaaaaggcauggacccucaucacagcacacacaucuccagucaaguuccuccgacaagcagugcuaguuaaauacucuuggggguuuagacgauacgugucaaucauaaaauuucgauaugccaaguauauuucuggagucuuggauuuguuuuuuccauugaagaacucaggaagagcacgccguucaaucacaugaauacaguuauaaucaaaccaugaugcauaacuaggaauaauaaugugauuggucugcucugucacauuaucuuccccaaggucaacugaucgacucugaucaccuuuggcaggaucuucaucuuccuuuccuccugcugugacuguuucuucauccugcucaucuagauccgcuacaguuccuccuuuaacagguguauuuucacuaucuuucuuuagguucacauuuuugggaaguacuacuucuucuauauuggguacagguguugggucuuccauauccuugguuagaucuucuugcucaucuuccucuuucugacuucugcgcuucccauaaaggcuagcuuggccuuucuucccacucuucuuccgugauucuguuggugucggagggggaggcgaaggcgaauguuuccucuuucgagcauuagcugaugcuuuucuaucucuucuuucuggacuucugacuggcucuucauucuugguugaaauccgcugacgaaaacucacaggcuuccuauuuucauccaccucauaauccuccucauucauccauucauugaaaauaucaguguccaaaauccauuucacaugaaccuuccaugguuuuucuggaauugguggaucuucaauuucagcaucaacaucauuacuauggacccaaguaucauagcugucuggguaaaagccccaaugcacuaacacuugcuucucuuuucucaucaccggucucaaccauucuucaucgucuugugaggaagaauauggguaaauguggugggaagcuuuugacuucucauccguaaauguucccugaugucguuugaugauaucuuucaauuuguuagccaacuucagaucaaugucuggaaugagguagauguugggucuggucaaacaauuguucugcaccaauguuuuuucaauguucauaaacauuuccacauuacgauccauucgagauggguucuguaggucaaaccuccgccaucccuguucauuuuuauacuuguaagcagccccaagaaugugacauaaggcgccuccagcuuugaaauccaugaaacacuuugcagggaguuuggugaaggccggguuggugacaugcuucccaaaggcaucuuccuggaacugaagaagcugcaccaccagcccagccaguguuuuauugguaggagcauccgcaugaacauacuucuuguagugcuugcccagccagacccgcaccgaauccagcugggacaccgucuccgggcucucccaaaacuugguggccgggcccccauccuuccgucgauaaacagcuaggccugcggcugccgccgcaauccccgagcccguggcgccuaccgcuguccccggcccgccgccgcccgccgcugcggccaucgucgcagcccgucguccccacagccuggcccaccccggcccucgcgguguuucccggucguucccgcgcgcacccccgcgcgcguagccgccacugccgcuucccggccccgcccag

SEQ ID NO: 2079 - RNA, 3460 nt, Homo sapiens
auuaccaccuccagggacaugcuuaauauuguccuuggaaccacacuuggacugaauauggcuguagcucacuuuuuuggagacuaucuggacuuuccccgcagguuguuucugugcacuugcaauugggccggcuguuuuagugacugcauuagauucaggcuuucggguuguagcagcugccucuguuuuuuucucuacuuuggccuuggagcggacauucuucagaucaggagcagaaguauugguggccaggcggcugagccggggggugguggagcuggguuuggccgaggugggcuucuugucuaugaaaggaguuguggagggccgggagggcauggguguggccuugacucggcugggaaccaccccugcagcgggggcugucccacugagaguggugguuuucuucauggaacugguggaggugcucuuugggcgacucaagucagcugguacagacuuugcagucaucuucuugacuucugcagguuuucccucagucuuaauggcagugggcuucuugggcaggagcguggaggggcuccuacugcuugggccaguugaggcaacagcagcagcuguugugguuuuugcaacagucugagugcucuuggacccagaucuggaggcuggggcagaagcuggcuuggauggugaggcccgcuucucaggagccuuugcaucugcaaugggcuuuggcuucacgucuuuugaagguaagauggaaggccuggcagaggcgacggcagggcguuuggguggggcagcuggcacuaagccugaagcaaggcucauggguuuuuuauucaacccaccaaugguggugggagcuggcugcuuagggagagaagugggcuguguuuuggcuuucgauguugaagucuuugcagguugagugguggccaaaggcuuuguuuucuucucugggcuuggugggagcuccuuguucggugggguggugaugucauuuccugucccacucaccacaggccuuccuucuucuggccuggcuauuccaagcuucucuggcucaucgggcccugugccugcaaugcagcugcucuccagaccguaggugggauccacuuucccagaggcucgugcugcuucuuguacuuucuugacaugagcuucaaccaauuccagugguaccuccucccggacccgagaaaacuccuccaaagccgcuuuugcugcagcagaugccacgcgaggguccaccacagaugccaaaaaagcaacaguacucauaacuggauuuccugacugacugaaggggacaggcugguaggccaaaggcccaagggaagcaucugaauucucaagguauggguccucaaugggaagucucaaaaaguggaggaugcauucauccugaguacgacuuccaacauguuccgacacuuuguuccaaucauccuuguacaucuccagggccuccaggaguagaagggucuccuguucaguccauucucuuccagcacuagcaccuuuacucuuugcuaauguuuucuuggaguaaaugucaguacggagaccaaaguucugcaaaucaacugguuuuuccuuguuuuucucaggaaaauuuagcaucuguugagcagcaggaaccugaggugaucgaagaugcagaggcacaagcccagaggggguaucagcuaauacauuaaaaugaggaguaggaggaggucccauugccaugggucuacuuuccgggucaacuugguaauuaacgaguccccacugcucuaaaaaggcauggacccucaucacagcacacacaucuccagucaaguuccuccgacaagcagugcuaguuaaauacucuuggggguuuagacgauacgugucaaucauaaaauuucgauaugccaaguauauuucuggagucuuggauuuguuuuuuccauugaagaacucaggaagagcacgccguucaaucacaugaauacaguuauaaucaaaccaugaugcauaacuaggaauaauaaugugauuggucugcucugucacauuaucuuccccaaggucaacugaucgacucugaucaccuuuggcaggaucuucaucuuccuuuccuccugcugugacuguuucuucauccugcucaucuagauccgcuacaguuccuccuuuaacagguguauuuucacuaucuuucuuuagguucacauuuuugggaaguacuacuucuucuauauuggguacagguguugggucuuccauauccuugguuagaucuucuugcucaucuuccucuuucugacuucugcgcuucccauaaaggcuagcuuggccuuucuucccacucuucuuccgugauucuguuggugucggagggggaggcgaaggcgaauguuuccucuuucgagcauuagcugaugcuuuucuaucucuucuuucuggacuucugacuggcucuucauucuugguugaaauccgcugacgaaaacucacaggcuuccuauuuucauccaccucauaauccuccucauucauccauucauugaaaauaucaguguccaaaauccauuucacaugaaccuuccaugguuuuucuggaauugguggaucuucaauuucagcaucaacaucauuacuauggacccaaguaucauagcugucuggguaaaagccccaaugcacuaacacuugcuucucuuuucucaucaccggucucaaccauucuucaucgucuugugaggaagaauauggguaaauguggugggaagcuuuugacuucucauccguaaauguucccugaugucguuugaugauaucuuucaauuuguuagccaacuucagaucaaugucuggaaugagguagauguugggucuggucaaacaauuguucugcaccaauguuuuuucaauguucauaaacauuuccacauuacgauccauucgagauggguucuguaggucaaaccuccgccaucccuguucauuuuuauacuuguaagcagccccaagaaugugacauaaggcgccuccagcuuugaaauccaugaaacacuuugcagggaguuuggugaaggccggguuggugacaugcuucccaaaggcaucuuccuggaacugaagaagcugcaccaccagcccagccaguguuuuauugguaggagcauccgcaugaacauacuucuuguagugcuugcccagccagacccgcaccgaauccagcugggacaccgucuccgggcucucccaaaacuugguggccgggcccccauccuuccgucgauaaacagcuaggccugcggcugccgccgcaauccccgagcccguggcgccuaccgcuguccccggcccgccgccgcccgccgcugcggccaucgucgcagcccgucguccccacagccuggcccaccccggcccucgcgguguuucccggucguucccgcgcgcacccccgcgcgcguagccgccacugccgcuucccggccccgcccag

SEQ ID NO: 2080 - RNA, 6012 nt, Homo sapiens
cugcgugaugggacaucaggcagcuuuauuuauuuacucuuaaaacuguuacaacagaaucauggacugacacagguaauggcugagccauaagcaaaucgagaaguacagaaaugucccaccccaaacagcugcggaguacacaucacacagggccucuggucccggccuucucaggugcucuggaguggaggauccuuugagggaacucugaccacuccuguugucuaccuagagagcacgccacuugggccaccuacccccaaccuuuggccaaaggagugaaaggaccuggaaccugucgucaaccucagcauccucaugaccccaggacagacgcaguggaggcagcagguacucugggccugugcuguugccccugaggugucuccugacuacgcaacccuguuuccuucccacuuucaucccagcaggcccuuucuuccugcugacaaaacacuggcucccucauguucuuggcacagcagaaguguucugcacauggucucuacggaggaaagcuggucccccuggcccaggcagcacuuccuccgugagccccugcaguuuccuggugugugcuuggggagcuagggacauggugucaaaccuccacaaggcacugcuaccucagaaagggggaggaccugucaggcccaggacagccucccugcacauggagaucaaaucuaaacuuaggucaagaccccuaccuucuccagggaugccaggaccagagaagggcagaggucaggagggggcaugaggaggccaagucuggggcagccuccucagaggcaaaucuacacugcagccaaucccccuccagagaagcccuuggaaucucccaggccauuucacuacaaacuuauguuugaauccuuuauuagaaaccaugcaaacuuuaauacaaaaaauacaagugcaauaagaaucuuugugucaauacaguucccgggauuucuccucacugcagccaucccaaggccuagcugggaugcccucugugggccuugccucuccucccuccccucuccagucagggcauaagggaagcagauagccuuagucucaugccuuuuauuuuuaaauuuccagaccugauuuccuacuaucugcaugaggcucccuuggacaugagggcuuacauguccuagggugugggugccggccugaaggaauuccaucuccuggcccuuucuuguucuccagcccuggcuuuuuauccuagggcugaccaccagaucccagggaaugggacagagaugccaaaaccagccucuugguuagaaaagaaaagcagcauacacacaacaaaauggcaaaaccaaccaguccacgcuccaagggccccuugugugccugaccggcucaccagccacagccucugcaccccucuucccugccgcaccgccuccagggcccuaagcugcccacauccuccagcggggguggcauaaggauaucuccgcccuguucccucuaacacuuacugaggacuuucauguagacauggcuucaaccugcagaacuauuuugccaguuuuuagguuauuagaaaaaaauaaaaggacaaaacaagaaaaaugugacagcagcuaggcggguauguuaagcauggggacaggcagcacugacccccaacuuggggcagggcagcaagaagggcccgacaccaccugcauggggaggggggggcgcccauuugugggaccagagggagaggcaguggcuuaagcuccacggucagcguccugucaccacucggaauccaccuccacucuucccuccagguagauccagggagaagggagggcaugucaguuucuuuuggguuuggaccaaagaaccaaaaaaagaugaggauagaaucugguucuccucuccuagaucccaacuuagccucaaccaccccaacccccucccaaccuccuccacggagcaguggcgcagugauggggcaagaccaaagcagggagaugggcccaggcuggggagugagaggagguguggggcagggcugcugcugccccgggcacgcaaagcaggagggaaggcgagccuagcgggcugcccagcacggcgcccaagcgcucacuggucuaguggacagcccgggaaagggggccaaggacccgggagcccgaguuggggccgccagggaaguguggggggcgggagacaaugucggccccguggucggugcgggcccuggcauuugcccggaacgucagccuguaggucucaaucugcagugacaugggaggagggaagggagaggggaacaggggagacaagaggggaacacgggggagacggaagacgagaccagaaugucaucauuagaugcuugucuccuggaucuggcuguccaaggucugggccucccuuuggucaccacccccugacagggugggguggccauugaggccacuggcugaagugggggcgccagcuucaggcgcugccucagagauggccggcuccuccccagcagggggacccggacacagaggagccucgcugccaccgcccucagucuucacagcaccuccugcagguagguggcccacauuaucgagggaucccaccuuggccugggccuucuccuugaaguucaacuucugacuuucaaucuugacaucuccuccaccaggcuugugcuugauguuagccuuagacccacacuuggaggagaccuuagagauguccacuuucuuguucugaaucugaacauuaccaccuccagggacaugcuuaauauuguccuuggaaccacacuuggacugaauauggcuguagcucacuuuuuuggagacuaucuggacuuuccccgcagguuguuucugugcacuugcaauugggccggcuguuuuagugacugcauuagauucaggcuuucggguuguagcagcugccucuguuuuuuucucuacuuuggcccggccuccuccaggcugaugcuugauguuuuccguggagccaaccuuggagcggacauucuucagaucaggagcagaaguauugguggccaggcggcugagccggggggugguggagcuggguuuggccgaggugggcuucuugucuaugaaaggaguuguggagggccgggagggcauggguguggccuugacucggcugggaaccaccccugcagcgggggcugucccacugagaguggugguuuucuucauggaacugguggaggugcucuuugggcgacucaagucagcugguacagacuuugcagucaucuucuugacuucugcagguuuucccucagucuuaauggcagugggcuucuugggcaggagcguggaggggcuccuacugcuugggccaguugaggcaacagcagcagcuguugugguuuuugcaacagucugagugcucuuggacccagaucuggaggcuggggcagaagcuggcuuggauggugaggcccgcuucucaggagccuuugcaucugcaaugggcuuuggcuucacgucuuuugaagguaagauggaaggccuggcagaggcgacggcagggcguuuggguggggcagcuggcacuaagccugaagcaaggcucauggguuuuuuauucaacccaccaaugguggugggagcuggcugcuuagggagagaagugggcuguguuuuggcuuucgauguugaagucuuugcagguugagugguggccaaaggcuuuguuuucuucucugggcuuggugggagcuccuuguucggugggguggugaugucauuuccugucccacucaccacaggccuuccuucuucuggccuggcuauuccaagcuucucuggcucaucgggcccugugccugcaaugcagcugcucuccagaccguaggugggauccacuuucccagaggcucgugcugcuucuuguacuuucuugacaugagcuucaaccaauuccagugguaccuccucccggacccgagaaaacuccuccaaagccgcuuuugcugcagcagaugccacgcgaggguccaccacagaugccaaaaaagcaacaguacucauaacuggauuuccugacugacugaaggggacaggcugguaggccaaaggcccaagggaagcaucugaauucucaagguauggguccucaaugggaagucucaaaaaguggaggaugcauucauccugaguacgacuuccaacauguuccgacacuuuguuccaaucauccuuguacaucuccagggccuccaggaguagaagggucuccuguucaguccauucucuuccagcacuagcaccuuuacucuuugcuaauguuuucuuggaguaaaugucaguacggagaccaaaguucugcaaaucaacugguuuuuccuuguuuuucucaggaaaauuuagcaucuguugagcagcaggaaccugaggugaucgaagaugcagaggcacaagcccagaggggguaucagcuaauacauuaaaaugaggaguaggaggaggucccauugccaugggucuacuuuccgggucaacuugguaauuaacgaguccccacugcucuaaaaaggcauggacccucaucacagcacacacaucuccagucaaguuccuccgacaagcagugcuaguuaaauacucuuggggguuuagacgauacgugucaaucauaaaauuucgauaugccaaguauauuucuggagucuuggauuuguuuuuuccauugaagaacucaggaagagcacgccguucaaucacaugaauacaguuauaaucaaaccaugaugcauaacuaggaauaauaaugugauuggucugcucugucacauuaucuuccccaaggucaacugaucgacucugaucaccuuuggcaggaucuucaucuuccuuuccuccugcugugacuguuucuucauccugcucaucuagauccgcuacaguuccuccuuuaacagguguauuuucacuaucuuucuuuagguucacauuuuugggaaguacuacuucuucuauauuggguacagguguugggucuuccauauccuugguuagaucuucuugcucaucuuccucuuucugacuucugcgcuucccauaaaggcuagcuuggccuuucuucccacucuucuuccgugauucuguuggugucggagggggaggcgaaggcgaauguuuccucuuucgagcauuagcugaugcuuuucuaucucuucuuucuggacuucugacuggcucuucauucuugguugaaauccgcugacgaaaacucacaggcuuccuauuuucauccaccucauaauccuccucauucauccauucauugaaaauaucaguguccaaaauccauuucacaugaaccuuccaugguuuuucuggaauugguggaucuucaauuucagcaucaacaucauuacuauggacccaaguaucauagcugucuggguaaaagccccaaugcacuaacacuugcuucucuuuucucaucaccggucucaaccauucuucaucgucuugugaggaagaauauggguaaauguggugggaagcuuuugacuucucauccguaaauguucccugaugucguuugaugauaucuuucaauuuguuagccaacuucagaucaaugucuggaaugagguagauguugggucuggucaaacaauuguucugcaccaauguuuuuucaauguucauaaacauuuccacauuacgauccauucgagauggguucuguaggucaaaccuccgccaucccuguucauuuuuauacuuguaagcagccccaagaaugugacauaaggcgccuccagcuuugaaauccaugaaacacuuugcagggaguuuggugaaggccggguuggugacaugcuucccaaaggcaucuuccuggaacugaagaagcugcaccaccagcccagccaguguuuuauugguaggagcauccgcaugaacauacuuggaauagcacguccugcggccucagccgccucuuccgccauccuccguaggcugcauucugcccuagugagcgccgguuuuu

SEQ ID NO: 2081 - RNA, 5276 nt, Homo sapiens
ccagcuccucacucuuauccugaguagucauuccuucaguuuuagagacuggcucacucgguaugagaacagcccuuccguccuucuggcuguccagaagaaauggcagcucagauuuugcuuuuaccuucccagaaucuguucucauuuucccagaacuuccccuucccuuccugcuuuugccaucaccugccauucucuuaaaugguucauucucuaccccagggaccuguaccaacacuuggcccugcagcugcucagaaguaaagaugcugaucucuugucuuucguugggaaaagcuuccuuuuuuaguucuuuauccucuucagcuccuucaggaaacuccuucaguuugacauucugcaguuuagucauuuuacuuucauuauucccuucuuuuagauuacauucuaauggauuacuugcuaucaaaguggguaccaaauuugguauuucuuuugcugcuguggguuuugaaacuacacccauaaccucuugguccaagaaaggagagcaacccucuuuaagucugauauccaaagggguuucuacauuguaugcagaaacuucugcuagggguccuuucagauugagagggccuacugacuggcuuuuaucuacaggagucuucagguggggugcaggcugugguuuguauucauguugcuucagcaauuucuugucuugguuuuguaguacugacuuguuacuuuugcucucuuccucuacucucagcuuagacugagaacuuauugcaguuuugggggcuucuucagaaggauauaaaggaauucugagacucucugagacaaaguucucagcuaccagucuggcugcacuggaguuaacuaaacauucccuuuucaaguuuucuccagauacaaguccauauucuguacccauagugguaggcuggcuggggagaacaccugauuuuugugugucagcugcaaauggaugaccuuuaggcuuaucugcauugucaucauccgaagguccuccagcccgugguugagaauaucucuuuugcuuugguuucuucuucuuuuucuucaucauuauuggugugcuuucuauaucccaggccucccugccaagaucccucugggguucaagugagucaacaugaauacuuuuucuuugguucccaggcccaccacaggaggaugaaccagagacccaaccugacucagacaaagagcaguggcccagccugugaucaagagucuuccauggaggagagccucccagcagcucaggagggacccuggcaggcuugggccggguugaccugcggucacugggucugcaaacuuguuuggcuugugugggagggguaccgcaauacaugaaguuggcugaggucucugaagaaagcucagaagguugacuguugcaugguuuccuuuccccuaguuuuucuaacacagaauccuccucggccggcaagcugcacuuuuuccccguuccugugacgguuucuggugaaaucaugaaaguaggugcagcugacugccccacauccugcagagauucuaaaugggaauccucacuuauuccuuuuuguguuugugcaauuuccaugucuuuaauuggaacugguguugccucuguuucugagagugguggaacaucuuuggcuggagucacauuguuggccagggucagaaccccauccuuagccaggggugcuucuguuuugagggcugggaccugauccucagucagggccaccuccauuucuggaggcagacauacguucuugaugagaacuacuucuguuucuggagguggagucacauccuugcccagagccauuucuguuucugauaguggagacauguccuucaacaagcccacuucuuuuacuguggacggagccacauccuuggccggggcuauuucuguuucugggaguugagccauguccuugacuggggccaccucugcuucuaaagguagugcuuuauccuuggucaagaucacguugguuuccgggggcagugucaugucccuggccagggcuaccucuguuucugaggacaaagccaccuucucagcagaggauauuucuguggaugauauaaugucauuagccugugccaccucuauuucugagaguaauaccaaauccuuggcugggacuaucuuguuuucuuuggguggucccauguccuuggaaggagccaaguccauuuuuauaggagaugcccucucuguuucuuucuuguuuucuuuggguggucccauguccuuggaaggggcuaaguccauuuuuauaggagaugcccucucuguuucuuucaacagugucacauccuuggcuggggcuaccucuguuucugugggcaguaccacauucuuggcugaagauacaucuguuucugugggccaucugacauccuuaaccagggccacuucuuuuucuguggguaguuccauguccuugacuagggccauaucugauuccauggauggcugcauguccuuggccagugucacaucuaauuuggugggugauuccauaucuuuagccaaugccaccucgguuuuuguagcuagugccauguccuuggcgagggccaucucuguuucuuuagauggugccaugucaguagucuucagucccaucauuauuuccaaugcuugugcugguggccucucuucugaugccauuucuaucuccuuggcuagcucuaagggaacugccguuggcugaggagguucugcaacagccucuggggaaacaaaggacucugaguguggagaguuuaaggcuuccacagaccaccccugagguacaacagcuguguugcagggagacauaccguaacugucuuucaagggaucauuuuguccugcaaauauugaaguaucagcugucgcacuggagggaaagaccaaaucugccaggucaucaucaugguacaucuuaaagggaucagucuggauaggaucgaccacuugcucagguuggaaacaaaaguugguaucuucuggccaguucuggcuauuuggguauuccugguaggccauuuucucuucaaggaauucaguuggagacccaagcuucucuggcucaucgggcccugugccugcaaugcagcugcucuccagaccguaggugggauccacuuucccagaggcucgugcugcuucuuguacuuucuugacaugagcuucaaccaauuccagugguaccuccucccggacccgagaaaacuccuccaaagccgcuuuugcugcagcagaugccacgcgaggguccaccacagaugccaaaaaagcaacaguacucauaacuggauuuccugacugacugaaggggacaggcugguaggccaaaggcccaagggaagcaucugaauucucaagguauggguccucaaugggaagucucaaaaaguggaggaugcauucauccugaguacgacuuccaacauguuccgacacuuuguuccaaucauccuuguacaucuccagggccuccaggaguagaagggucuccuguucaguccauucucuuccagcacuagcaccuuuacucuuugcuaauguuuucuuggaguaaaugucaguacggagaccaaaguucugcaaaucaacugguuuuuccuuguuuuucucaggaaaauuuagcaucuguugagcagcaggaaccugaggugaucgaagaugcagaggcacaagcccagaggggguaucagcuaauacauuaaaaugaggaguaggaggaggucccauugccaugggucuacuuuccgggucaacuugguaauuaacgaguccccacugcucuaaaaaggcauggacccucaucacagcacacacaucuccagucaaguuccuccgacaagcagugcuaguuaaauacucuuggggguuuagacgauacgugucaaucauaaaauuucgauaugccaaguauauuucuggagucuuggauuuguuuuuuccauugaagaacucaggaagagcacgccguucaaucacaugaauacaguuauaaucaaaccaugaugcauaacuaggaauaauaaugugauuggucugcucugucacauuaucuuccccaaggucaacugaucgacucugaucaccuuuggcaggaucuucaucuuccuuuccuccugcugugacuguuucuucauccugcucaucuagauccgcuacaguuccuccuuuaacagguguauuuucacuaucuuucuuuagguucacauuuuugggaaguacuacuucuucuauauuggguacagguguugggucuuccauauccuugguuagaucuucuugcucaucuuccucuuucugacuucugcgcuucccauaaaggcuagcuuggccuuucuucccacucuucuuccgugauucuguuggugucggagggggaggcgaaggcgaauguuuccucuuucgagcauuagcugaugcuuuucuaucucuucuuucuggacuucugacuggcucuucauucuugguugaaauccgcugacgaaaacucacaggcuuccuauuuucauccaccucauaauccuccucauucauccauucauugaaaauaucaguguccaaaauccauuucacaugaaccuuccaugguuuuucuggaauugguggaucuucaauuucagcaucaacaucauuacuauggacccaaguaucauagcugucuggguaaaagccccaaugcacuaacacuugcuucucuuuucucaucaccggucucaaccauucuucaucgucuugugaggaagaauauggguaaauguggugggaagcuuuugacuucucauccguaaauguucccugaugucguuugaugauaucuuucaauuuguuagccaacuucagaucaaugucuggaaugagguagauguugggucuggucaaacaauuguucugcaccaauguuuuuucaauguucauaaacauuuccacauuacgauccauucgagauggguucuguaggucaaaccuccgccaucccuguucauuuuuauacuuguaagcagccccaagaaugugacauaaggcgccuccagcuuugaaauccaugaaacacuuugcagggaguuuggugaaggccggguuggugacaugcuucccaaaggcaucuuccuggaacugaagaagcugcaccaccagcccagccaguguuuuauugguaggagcauccgcaugaacauacuuggaauagcacguccugcggccucagccgccucuuccgccauccuccguaggcugcauucugcccuagugagcgccgguuuuu

SEQ ID NO: 2082 - RNA, 7719 nt, Homo sapiens
cugcgugaugggacaucaggcagcuuuauuuauuuacucuuaaaacuguuacaacagaaucauggacugacacagguaauggcugagccauaagcaaaucgagaaguacagaaaugucccaccccaaacagcugcggaguacacaucacacagggccucuggucccggccuucucaggugcucuggaguggaggauccuuugagggaacucugaccacuccuguugucuaccuagagagcacgccacuugggccaccuacccccaaccuuuggccaaaggagugaaaggaccuggaaccugucgucaaccucagcauccucaugaccccaggacagacgcaguggaggcagcagguacucugggccugugcuguugccccugaggugucuccugacuacgcaacccuguuuccuucccacuuucaucccagcaggcccuuucuuccugcugacaaaacacuggcucccucauguucuuggcacagcagaaguguucugcacauggucucuacggaggaaagcuggucccccuggcccaggcagcacuuccuccgugagccccugcaguuuccuggugugugcuuggggagcuagggacauggugucaaaccuccacaaggcacugcuaccucagaaagggggaggaccugucaggcccaggacagccucccugcacauggagaucaaaucuaaacuuaggucaagaccccuaccuucuccagggaugccaggaccagagaagggcagaggucaggagggggcaugaggaggccaagucuggggcagccuccucagaggcaaaucuacacugcagccaaucccccuccagagaagcccuuggaaucucccaggccauuucacuacaaacuuauguuugaauccuuuauuagaaaccaugcaaacuuuaauacaaaaaauacaagugcaauaagaaucuuugugucaauacaguucccgggauuucuccucacugcagccaucccaaggccuagcugggaugcccucugugggccuugccucuccucccuccccucuccagucagggcauaagggaagcagauagccuuagucucaugccuuuuauuuuuaaauuuccagaccugauuuccuacuaucugcaugaggcucccuuggacaugagggcuuacauguccuagggugugggugccggccugaaggaauuccaucuccuggcccuuucuuguucuccagcccuggcuuuuuauccuagggcugaccaccagaucccagggaaugggacagagaugccaaaaccagccucuugguuagaaaagaaaagcagcauacacacaacaaaauggcaaaaccaaccaguccacgcuccaagggccccuugugugccugaccggcucaccagccacagccucugcaccccucuucccugccgcaccgccuccagggcccuaagcugcccacauccuccagcggggguggcauaaggauaucuccgcccuguucccucuaacacuuacugaggacuuucauguagacauggcuucaaccugcagaacuauuuugccaguuuuuagguuauuagaaaaaaauaaaaggacaaaacaagaaaaaugugacagcagcuaggcggguauguuaagcauggggacaggcagcacugacccccaacuuggggcagggcagcaagaagggcccgacaccaccugcauggggaggggggggcgcccauuugugggaccagagggagaggcaguggcuuaagcuccacggucagcguccugucaccacucggaauccaccuccacucuucccuccagguagauccagggagaagggagggcaugucaguuucuuuuggguuuggaccaaagaaccaaaaaaagaugaggauagaaucugguucuccucuccuagaucccaacuuagccucaaccaccccaacccccucccaaccuccuccacggagcaguggcgcagugauggggcaagaccaaagcagggagaugggcccaggcuggggagugagaggagguguggggcagggcugcugcugccccgggcacgcaaagcaggagggaaggcgagccuagcgggcugcccagcacggcgcccaagcgcucacuggucuaguggacagcccgggaaagggggccaaggacccgggagcccgaguuggggccgccagggaaguguggggggcgggagacaaugucggccccguggucggugcgggcccuggcauuugcccggaacgucagccuguaggucucaaucugcagugacaugggaggagggaagggagaggggaacaggggagacaagaggggaacacgggggagacggaagacgagaccagaaugucaucauuagaugcuugucuccuggaucuggcuguccaaggucugggccucccuuuggucaccacccccugacagggugggguggccauugaggccacuggcugaagugggggcgccagcuucaggcgcugccucagagauggccggcuccuccccagcagggggacccggacacagaggagccucgcugccaccgcccucagucuucacagcaccuccugcagguagguggcccacauuaucgagggaucccaccuuggccugggccuucuccuugaaguucaacuucugacuuucaaucuugacaucuccuccaccaggcuugugcuugauguuagccuuagacccacacuuggaggagaccuuagagauguccacuuucuuguucugaaucugaacauuaccaccuccagggacaugcuuaauauuguccuuggaaccacacuuggacugaauauggcuguagcucacuuuuuuggagacuaucuggacuuuccccgcagguuguuucugugcacuugcaauugggccggcuguuuuagugacugcauuagauucaggcuuucggguuguagcagcugccucuguuuuuuucucuacuuuggcccggccuccuccaggcugaugcuugauguuuuccguggagccaaccuuggagcggacauucuucagaucaggagcagaaguauugguggccaggcggcugagccggggggugguggagcuggguuuggccgaggugggcuucuugucuaugaaaggaguuguggagggccgggagggcauggguguggccuugacucggcugggaaccaccccugcagcgggggcugucccacugagaguggugguuuucuucauggaacugguggaggugcucuuugggcgacucaagucagcugguacagacuuugcagucaucuucuugacuucugcagguuuucccucagucuuaauggcagugggcuucuugggcaggagcguggaggggcuccuacugcuugggccaguugaggcaacagcagcagcuguugugguuuuugcaacagucugagugcucuuggacccagaucuggaggcuggggcagaagcuggcuuggauggugaggcccgcuucucaggagccuuugcaucugcaaugggcuuuggcuucacgucuuuugaagguaagauggaaggccuggcagaggcgacggcagggcguuuggguggggcagcuggcacuaagccugaagcaaggcucauggguuuuuuauucaacccaccaaugguggugggagcuggcugcuuagggagagaagugggcuguguuuuggcuuucgauguugaagucuuugcagguugagugguggccaaaggcuuuguuuucuucucugggcuuggugggagcuccuuguucggugggguggugaugucauuuccugucccacucaccacaggccuuccuucuucuggccuggcuauuccugaggucucugaagaaagcucagaagguugacuguugcaugguuuccuuuccccuaguuuuucuaacacagaauccuccucggccggcaagcugcacuuuuuccccguuccugugacgguuucuggugaaaucaugaaaguaggugcagcugacugccccacauccugcagagauucuaaaugggaauccucacuuauuccuuuuuguguuugugcaauuuccaugucuuuaauuggaacugguguugccucuguuucugagagugguggaacaucuuuggcuggagucacauuguuggccagggucagaaccccauccuuagccaggggugcuucuguuuugagggcugggaccugauccucagucagggccaccuccauuucuggaggcagacauacguucuugaugagaacuacuucuguuucuggagguggagucacauccuugcccagagccauuucuguuucugauaguggagacauguccuucaacaagcccacuucuuuuacuguggacggagccacauccuuggccggggcuauuucuguuucugggaguugagccauguccuugacuggggccaccucugcuucuaaagguagugcuuuauccuuggucaagaucacguugguuuccgggggcagugucaugucccuggccagggcuaccucuguuucugaggacaaagccaccuucucagcagaggauauuucuguggaugauauaaugucauuagccugugccaccucuauuucugagaguaauaccaaauccuuggcugggacuaucuuguuuucuuuggguggucccauguccuuggaaggagccaaguccauuuuuauaggagaugcccucucuguuucuuucuuguuuucuuuggguggucccauguccuuggaaggggcuaaguccauuuuuauaggagaugcccucucuguuucuuucaacagugucacauccuuggcuggggcuaccucuguuucugugggcaguaccacauucuuggcugaagauacaucuguuucugugggccaucugacauccuuaaccagggccacuucuuuuucuguggguaguuccauguccuugacuagggccauaucugauuccauggauggcugcauguccuuggccagugucacaucuaauuuggugggugauuccauaucuuuagccaaugccaccucgguuuuuguagcuagugccauguccuuggcgagggccaucucuguuucuuuagauggugccaugucaguagucuucagucccaucauuauuuccaaugcuugugcugguggccucucuucugaugccauuucuaucuccuuggcuagcucuaagggaacugccguuggcugaggagguucugcaacagccucuggggaaacaaaggacucugaguguggagaguuuaaggcuuccacagaccaccccugagguacaacagcuguguugcagggagacauaccguaacugucuuucaagggaucauuuuguccugcaaauauugaaguaucagcugucgcacuggagggaaagaccaaaucugccaggucaucaucaugguacaucuuaaagggaucagucuggauaggaucgaccacuugcucagguuggaaacaaaaguugguaucuucuggccaguucuggcuauuuggguauuccugguaggccauuuucucuucaaggaauucaguuggagacccaagcuucucuggcucaucgggcccugugccugcaaugcagcugcucuccagaccguaggugggauccacuuucccagaggcucgugcugcuucuuguacuuucuugacaugagcuucaaccaauuccagugguaccuccucccggacccgagaaaacuccuccaaagccgcuuuugcugcagcagaugccacgcgaggguccaccacagaugccaaaaaagcaacaguacucauaacuggauuuccugacugacugaaggggacaggcugguaggccaaaggcccaagggaagcaucugaauucucaagguauggguccucaaugggaagucucaaaaaguggaggaugcauucauccugaguacgacuuccaacauguuccgacacuuuguuccaaucauccuuguacaucuccagggccuccaggaguagaagggucuccuguucaguccauucucuuccagcacuagcaccuuuacucuuugcuaauguuuucuuggaguaaaugucaguacggagaccaaaguucugcaaaucaacugguuuuuccuuguuuuucucaggaaaauuuagcaucuguugagcagcaggaaccugaggugaucgaagaugcagaggcacaagcccagaggggguaucagcuaauacauuaaaaugaggaguaggaggaggucccauugccaugggucuacuuuccgggucaacuugguaauuaacgaguccccacugcucuaaaaaggcauggacccucaucacagcacacacaucuccagucaaguuccuccgacaagcagugcuaguuaaauacucuuggggguuuagacgauacgugucaaucauaaaauuucgauaugccaaguauauuucuggagucuuggauuuguuuuuuccauugaagaacucaggaagagcacgccguucaaucacaugaauacaguuauaaucaaaccaugaugcauaacuaggaauaauaaugugauuggucugcucugucacauuaucuuccccaaggucaacugaucgacucugaucaccuuuggcaggaucuucaucuuccuuuccuccugcugugacuguuucuucauccugcucaucuagauccgcuacaguuccuccuuuaacagguguauuuucacuaucuuucuuuagguucacauuuuugggaaguacuacuucuucuauauuggguacagguguugggucuuccauauccuugguuagaucuucuugcucaucuuccucuuucugacuucugcgcuucccauaaaggcuagcuuggccuuucuucccacucuucuuccgugauucuguuggugucggagggggaggcgaaggcgaauguuuccucuuucgagcauuagcugaugcuuuucuaucucuucuuucuggacuucugacuggcucuucauucuugguugaaauccgcugacgaaaacucacaggcuuccuauuuucauccaccucauaauccuccucauucauccauucauugaaaauaucaguguccaaaauccauuucacaugaaccuuccaugguuuuucuggaauugguggaucuucaauuucagcaucaacaucauuacuauggacccaaguaucauagcugucuggguaaaagccccaaugcacuaacacuugcuucucuuuucucaucaccggucucaaccauucuucaucgucuugugaggaagaauauggguaaauguggugggaagcuuuugacuucucauccguaaauguucccugaugucguuugaugauaucuuucaauuuguuagccaacuucagaucaaugucuggaaugagguagauguugggucuggucaaacaauuguucugcaccaauguuuuuucaauguucauaaacauuuccacauuacgauccauucgagauggguucuguaggucaaaccuccgccaucccuguucauuuuuauacuuguaagcagccccaagaaugugacauaaggcgccuccagcuuugaaauccaugaaacacuuugcagggaguuuggugaaggccggguuggugacaugcuucccaaaggcaucuuccuggaacugaagaagcugcaccaccagcccagccaguguuuuauugguaggagcauccgcaugaacauacuuggaauagcacguccugcggccucagccgccucuuccgccauccuccguaggcugcauucugcccuagugagcgccgguuuuu

SEQ ID NO: 2083 - RNA, 3048 nt, Homo sapiens
cugcgugaugggacaucaggcagcuuuauuuauuuacucuuaaaacuguuacaacagaaucauggacugacacagguaauggcugagccauaagcaaaucgagaaguacagaaaugucccaccccaaacagcugcggaguacacaucacacagggccucuggucccggccuucucaggugcucuggaguggaggauccuuugagggaacucugaccacuccuguugucuaccuagagagcacgccacuugggccaccuacccccaaccuuuggccaaaggagugaaaggaccuggaaccugucgucaaccucagcauccucaugaccccaggacagacgcaguggaggcagcagguacucugggccugugcuguugccccugaggugucuccugacuacgcaacccuguuuccuucccacuuucaucccagcaggcccuuucuuccugcugacaaaacacuggcucccucauguucuuggcacagcagaaguguucugcacauggucucuacggaggaaagcuggucccccuggcccaggcagcacuuccuccgugagccccugcaguuuccuggugugugcuuggggagcuagggacauggugucaaaccuccacaaggcacugcuaccucagaaagggggaggaccugucaggcccaggacagccucccugcacauggagaucaaaucuaaacuuaggucaagaccccuaccuucuccagggaugccaggaccagagaagggcagaggucaggagggggcaugaggaggccaagucuggggcagccuccucagaggcaaaucuacacugcagccaaucccccuccagagaagcccuuggaaucucccaggccauuucacuacaaacuuauguuugaauccuuuauuagaaaccaugcaaacuuuaauacaaaaaauacaagugcaauaagaaucuuugugucaauacaguucccgggauuucuccucacugcagccaucccaaggccuagcugggaugcccucugugggccuugccucuccucccuccccucuccagucagggcauaagggaagcagauagccuuagucucaugccuuuuauuuuuaaauuuccagaccugauuuccuacuaucugcaugaggcucccuuggacaugagggcuuacauguccuagggugugggugccggccugaaggaauuccaucuccuggcccuuucuuguucuccagcccuggcuuuuuauccuagggcugaccaccagaucccagggaaugggacagagaugccaaaaccagccucuugguuagaaaagaaaagcagcauacacacaacaaaauggcaaaaccaaccaguccacgcuccaagggccccuugugugccugaccggcucaccagccacagccucugcaccccucuucccugccgcaccgccuccagggcccuaagcugcccacauccuccagcggggguggcauaaggauaucuccgcccuguucccucuaacacuuacugaggacuuucauguagacauggcuucaaccugcagaacuauuuugccaguuuuuagguuauuagaaaaaaauaaaaggacaaaacaagaaaaaugugacagcagcuaggcggguauguuaagcauggggacaggcagcacugacccccaacuuggggcagggcagcaagaagggcccgacaccaccugcauggggaggggggggcgcccauuugugggaccagagggagaggcaguggcuuaagcuccacggucagcguccugucaccacucggaauccaccuccacucuucccuccagguagauccagggagaagggagggcaugucaguuucuuuuggguuuggaccaaagaaccaaaaaaagaugaggauagaaucugguucuccucuccuagaucccaacuuagccucaaccaccccaacccccucccaaccuccuccacggagcaguggcgcagugauggggcaagaccaaagcagggagaugggcccaggcuggggagugagaggagguguggggcagggcugcugcugccccgggcacgcaaagcaggagggaaggcgagccuagcgggcugcccagcacggcgcccaagcgcucacuggucuaguggacagcccgggaaagggggccaaggacccgggagcccgaguuggggccgccagggaaguguggggggcgggagacaaugucggccccguggucggugcgggcccuggcauuugcccggaacgucagccuguaggucucaaucugcagugacaugggaggagggaagggagaggggaacaggggagacaagaggggaacacgggggagacggaagacgagaccagaaugucaucauuagaugcuugucuccuggaucuggcuguccaaggucugggccucccuuuggucaccacccccugacagggugggguggccauugaggccacuggcugaagugggggcgccagcuucaggcgcugccucagagauggccggcuccuccccagcagggggacccggacacagaggagccucgcugccaccgcccucagucuucacagcaccuccugcagguagguggcccacauuaucgagggaucccaccuuggccugggccuucuccuugaaguucaacuucugacuuucaaucuugacaucuccuccaccaggcuugugcuugauguuagccuuagacccacacuuggaggagaccuuagagauguccacuuucuuguucugaaucugaaccuucuuguagugcuugcccagccagacccgcaccgaauccagcugggacaccgucuccgggcucucccaaaacuugguggccgggcccccauccuuccgucgauaaacagcuaggccugcggcugccgccgcaauccccgagcccguggcgccuaccgcuguccccggcccgccgccgcccgccgcugcggccaucgucgcagcccgucguccccacagccuggcccaccccggcccucgcgguguuucccggucguucccgcgcgcacccccgcgcgcguagccgccacugccgcuucccggccccgcccag

SEQ ID NO: 2084 - RNA, 5504 nt, Homo sapiens
ccagcuccucacucuuauccugaguagucauuccuucaguuuuagagacuggcucacucgguaugagaacagcccuuccguccuucuggcuguccagaagaaauggcagcucagauuuugcuuuuaccuucccagaaucuguucucauuuucccagaacuuccccuucccuuccugcuuuugccaucaccugccauucucuuaaaugguucauucucuaccccagggaccuguaccaacacuuggcccugcagcugcucagaaguaaagaugcugaucucuugucuuucguugggaaaagcuuccuuuuuuaguucuuuauccucuucagcuccuucaggaaacuccuucaguuugacauucugcaguuuagucauuuuacuuucauuauucccuucuuuuagauuacauucuaauggauuacuugcuaucaaaguggguaccaaauuugguauuucuuuugcugcuguggguuuugaaacuacacccauaaccucuugguccaagaaaggagagcaacccucuuuaagucugauauccaaagggguuucuacauuguaugcagaaacuucugcuagggguccuuucagauugagagggccuacugacuggcuuuuaucuacaggagucuucagguggggugcaggcugugguuuguauucauguugcuucagcaauuucuugucuugguuuuguaguacugacuuguuacuuuugcucucuuccucuacucucagcuuagacugagaacuuauugcaguuuugggggcuucuucagaaggauauaaaggaauucugagacucucugagacaaaguucucagcuaccagucuggcugcacuggaguuaacuaaacauucccuuuucaaguuuucuccagauacaaguccauauucuguacccauagugguaggcuggcuggggagaacaccugauuuuugugugucagcugcaaauggaugaccuuuaggcuuaucugcauugucaucauccgaagguccuccagcccgugguugagaauaucucuuuugcuuugguuucuucuucuuuuucuucaucauuauuggugugcuuucuauaucccaggccucccugccaagaucccucugggguucaagugagucaacaugaauacuuuuucuuugguucccaggcccaccacaggaggaugaaccagagacccaaccugacucagacaaagagcaguggcccagccugugaucaagagucuuccauggaggagagccucccagcagcucaggagggacccuggcaggcuugggccggguugaccugcggucacugggucugcaaacuuguuuggcuugugugggagggguaccgcaauacaugaaguuggcugaggucucugaagaaagcucagaagguugacuguugcaugguuuccuuuccccuaguuuuucuaacacagaauccuccucggccggcaagcugcacuuuuuccccguuccugugacgguuucuggugaaaucaugaaaguaggugcagcugacugccccacauccugcagagauucuaaaugggaauccucacuuauuccuuuuuguguuugugcaauuuccaugucuuuaauuggaacugguguugccucuguuucugagagugguggaacaucuuuggcuggagucacauuguuggccagggucagaaccccauccuuagccaggggugcuucuguuuugagggcugggaccugauccucagucagggccaccuccauuucuggaggcagacauacguucuugaugagaacuacuucuguuucuggagguggagucacauccuugcccagagccauuucuguuucugauaguggagacauguccuucaacaagcccacuucuuuuacuguggacggagccacauccuuggccggggcuauuucuguuucugggaguugagccauguccuugacuggggccaccucugcuucuaaagguagugcuuuauccuuggucaagaucacguugguuuccgggggcagugucaugucccuggccagggcuaccucuguuucugaggacaaagccaccuucucagcagaggauauuucuguggaugauauaaugucauuagccugugccaccucuauuucugagaguaauaccaaauccuuggcugggacuaucuuguuuucuuuggguggucccauguccuuggaaggagccaaguccauuuuuauaggagaugcccucucuguuucuuucuuguuuucuuuggguggucccauguccuuggaaggggcuaaguccauuuuuauaggagaugcccucucuguuucuuucaacagugucacauccuuggcuggggcuaccucuguuucugugggcaguaccacauucuuggcugaagauacaucuguuucugugggccaucugacauccuuaaccagggccacuucuuuuucuguggguaguuccauguccuugacuagggccauaucugauuccauggauggcugcauguccuuggccagugucacaucuaauuuggugggugauuccauaucuuuagccaaugccaccucgguuuuuguagcuagugccauguccuuggcgagggccaucucuguuucuuuagauggugccaugucaguagucuucagucccaucauuauuuccaaugcuugugcugguggccucucuucugaugccauuucuaucuccuuggcuagcucuaagggaacugccguuggcugaggagguucugcaacagccucuggggaaacaaaggacucugaguguggagaguuuaaggcuuccacagaccaccccugagguacaacagcuguguugcagggagacauaccguaacugucuuucaagggaucauuuuguccugcaaauauugaaguaucagcugucgcacuggagggaaagaccaaaucugccaggucaucaucaugguacaucuuaaagggaucagucuggauaggaucgaccacuugcucagguuggaaacaaaaguugguaucuucuggccaguucuggcuauuuggguauuccugguaggccauuuucucuucaaggaauucaguuggagacccaagcuucucuggcucaucgggcccugugccugcaaugcagcugcucuccagaccguaggugggauccacuuucccagaggcucgugcugcuucuuguacuuucuugacaugagcuucaaccaauuccagugguaccuccucccggacccgagaaaacuccuccaaagccgcuuuugcugcagcagaugccacgcgaggguccaccacagaugccaaaaaagcaacaguacucauaacuggauuuccugacugacugaaggggacaggcugguaggccaaaggcccaagggaagcaucugaauucucaagguauggguccucaaugggaagucucaaaaaguggaggaugcauucauccugaguacgacuuccaacauguuccgacacuuuguuccaaucauccuuguacaucuccagggccuccaggaguagaagggucuccuguucaguccauucucuuccagcacuagcaccuuuacucuuugcuaauguuuucuuggaguaaaugucaguacggagaccaaaguucugcaaaucaacugguuuuuccuuguuuuucucaggaaaauuuagcaucuguugagcagcaggaaccugaggugaucgaagaugcagaggcacaagcccagaggggguaucagcuaauacauuaaaaugaggaguaggaggaggucccauugccaugggucuacuuuccgggucaacuugguaauuaacgaguccccacugcucuaaaaaggcauggacccucaucacagcacacacaucuccagucaaguuccuccgacaagcagugcuaguuaaauacucuuggggguuuagacgauacgugucaaucauaaaauuucgauaugccaaguauauuucuggagucuuggauuuguuuuuuccauugaagaacucaggaagagcacgccguucaaucacaugaauacaguuauaaucaaaccaugaugcauaacuaggaauaauaaugugauuggucugcucugucacauuaucuuccccaaggucaacugaucgacucugaucaccuuuggcaggaucuucaucuuccuuuccuccugcugugacuguuucuucauccugcucaucuagauccgcuacaguuccuccuuuaacagguguauuuucacuaucuuucuuuagguucacauuuuugggaaguacuacuucuucuauauuggguacagguguugggucuuccauauccuugguuagaucuucuugcucaucuuccucuuucugacuucugcgcuucccauaaaggcuagcuuggccuuucuucccacucuucuuccgugauucuguuggugucggagggggaggcgaaggcgaauguuuccucuuucgagcauuagcugaugcuuuucuaucucuucuuucuggacuucugacuggcucuucauucuugguugaaauccgcugacgaaaacucacaggcuuccuauuuucauccaccucauaauccuccucauucauccauucauugaaaauaucaguguccaaaauccauuucacaugaaccuuccaugguuuuucuggaauugguggaucuucaauuucagcaucaacaucauuacuauggacccaaguaucauagcugucuggguaaaagccccaaugcacuaacacuugcuucucuuuucucaucaccggucucaaccauucuucaucgucuugugaggaagaauauggguaaauguggugggaagcuuuugacuucucauccguaaauguucccugaugucguuugaugauaucuuucaauuuguuagccaacuucagaucaaugucuggaaugagguagauguugggucuggucaaacaauuguucugcaccaauguuuuuucaauguucauaaacauuuccacauuacgauccauucgagauggguucuguaggucaaaccuccgccaucccuguucauuuuuauacuuguaagcagccccaagaaugugacauaaggcgccuccagcuuugaaauccaugaaacacuuugcagggaguuuggugaaggccggguuggugacaugcuucccaaaggcaucuuccuggaacugaagaagcugcaccaccagcccagccaguguuuuauugguaggagcauccgcaugaacauacuucuuguagugcuugcccagccagacccgcaccgaauccagcugggacaccgucuccgggcucucccaaaacuugguggccgggcccccauccuuccgucgauaaacagcuaggccugcggcugccgccgcaauccccgagcccguggcgccuaccgcuguccccggcccgccgccgcccgccgcugcggccaucgucgcagcccgucguccccacagccuggcccaccccggcccucgcgguguuucccggucguucccgcgcgcacccccgcgcgcguagccgccacugccgcuucccggccccgcccag

SEQ ID NO: 2085 - RNA, 7947 nt, Homo sapiens
cugcgugaugggacaucaggcagcuuuauuuauuuacucuuaaaacuguuacaacagaaucauggacugacacagguaauggcugagccauaagcaaaucgagaaguacagaaaugucccaccccaaacagcugcggaguacacaucacacagggccucuggucccggccuucucaggugcucuggaguggaggauccuuugagggaacucugaccacuccuguugucuaccuagagagcacgccacuugggccaccuacccccaaccuuuggccaaaggagugaaaggaccuggaaccugucgucaaccucagcauccucaugaccccaggacagacgcaguggaggcagcagguacucugggccugugcuguugccccugaggugucuccugacuacgcaacccuguuuccuucccacuuucaucccagcaggcccuuucuuccugcugacaaaacacuggcucccucauguucuuggcacagcagaaguguucugcacauggucucuacggaggaaagcuggucccccuggcccaggcagcacuuccuccgugagccccugcaguuuccuggugugugcuuggggagcuagggacauggugucaaaccuccacaaggcacugcuaccucagaaagggggaggaccugucaggcccaggacagccucccugcacauggagaucaaaucuaaacuuaggucaagaccccuaccuucuccagggaugccaggaccagagaagggcagaggucaggagggggcaugaggaggccaagucuggggcagccuccucagaggcaaaucuacacugcagccaaucccccuccagagaagcccuuggaaucucccaggccauuucacuacaaacuuauguuugaauccuuuauuagaaaccaugcaaacuuuaauacaaaaaauacaagugcaauaagaaucuuugugucaauacaguucccgggauuucuccucacugcagccaucccaaggccuagcugggaugcccucugugggccuugccucuccucccuccccucuccagucagggcauaagggaagcagauagccuuagucucaugccuuuuauuuuuaaauuuccagaccugauuuccuacuaucugcaugaggcucccuuggacaugagggcuuacauguccuagggugugggugccggccugaaggaauuccaucuccuggcccuuucuuguucuccagcccuggcuuuuuauccuagggcugaccaccagaucccagggaaugggacagagaugccaaaaccagccucuugguuagaaaagaaaagcagcauacacacaacaaaauggcaaaaccaaccaguccacgcuccaagggccccuugugugccugaccggcucaccagccacagccucugcaccccucuucccugccgcaccgccuccagggcccuaagcugcccacauccuccagcggggguggcauaaggauaucuccgcccuguucccucuaacacuuacugaggacuuucauguagacauggcuucaaccugcagaacuauuuugccaguuuuuagguuauuagaaaaaaauaaaaggacaaaacaagaaaaaugugacagcagcuaggcggguauguuaagcauggggacaggcagcacugacccccaacuuggggcagggcagcaagaagggcccgacaccaccugcauggggaggggggggcgcccauuugugggaccagagggagaggcaguggcuuaagcuccacggucagcguccugucaccacucggaauccaccuccacucuucccuccagguagauccagggagaagggagggcaugucaguuucuuuuggguuuggaccaaagaaccaaaaaaagaugaggauagaaucugguucuccucuccuagaucccaacuuagccucaaccaccccaacccccucccaaccuccuccacggagcaguggcgcagugauggggcaagaccaaagcagggagaugggcccaggcuggggagugagaggagguguggggcagggcugcugcugccccgggcacgcaaagcaggagggaaggcgagccuagcgggcugcccagcacggcgcccaagcgcucacuggucuaguggacagcccgggaaagggggccaaggacccgggagcccgaguuggggccgccagggaaguguggggggcgggagacaaugucggccccguggucggugcgggcccuggcauuugcccggaacgucagccuguaggucucaaucugcagugacaugggaggagggaagggagaggggaacaggggagacaagaggggaacacgggggagacggaagacgagaccagaaugucaucauuagaugcuugucuccuggaucuggcuguccaaggucugggccucccuuuggucaccacccccugacagggugggguggccauugaggccacuggcugaagugggggcgccagcuucaggcgcugccucagagauggccggcuccuccccagcagggggacccggacacagaggagccucgcugccaccgcccucagucuucacagcaccuccugcagguagguggcccacauuaucgagggaucccaccuuggccugggccuucuccuugaaguucaacuucugacuuucaaucuugacaucuccuccaccaggcuugugcuugauguuagccuuagacccacacuuggaggagaccuuagagauguccacuuucuuguucugaaucugaacauuaccaccuccagggacaugcuuaauauuguccuuggaaccacacuuggacugaauauggcuguagcucacuuuuuuggagacuaucuggacuuuccccgcagguuguuucugugcacuugcaauugggccggcuguuuuagugacugcauuagauucaggcuuucggguuguagcagcugccucuguuuuuuucucuacuuuggcccggccuccuccaggcugaugcuugauguuuuccguggagccaaccuuggagcggacauucuucagaucaggagcagaaguauugguggccaggcggcugagccggggggugguggagcuggguuuggccgaggugggcuucuugucuaugaaaggaguuguggagggccgggagggcauggguguggccuugacucggcugggaaccaccccugcagcgggggcugucccacugagaguggugguuuucuucauggaacugguggaggugcucuuugggcgacucaagucagcugguacagacuuugcagucaucuucuugacuucugcagguuuucccucagucuuaauggcagugggcuucuugggcaggagcguggaggggcuccuacugcuugggccaguugaggcaacagcagcagcuguugugguuuuugcaacagucugagugcucuuggacccagaucuggaggcuggggcagaagcuggcuuggauggugaggcccgcuucucaggagccuuugcaucugcaaugggcuuuggcuucacgucuuuugaagguaagauggaaggccuggcagaggcgacggcagggcguuuggguggggcagcuggcacuaagccugaagcaaggcucauggguuuuuuauucaacccaccaaugguggugggagcuggcugcuuagggagagaagugggcuguguuuuggcuuucgauguugaagucuuugcagguugagugguggccaaaggcuuuguuuucuucucugggcuuggugggagcuccuuguucggugggguggugaugucauuuccugucccacucaccacaggccuuccuucuucuggccuggcuauuccugaggucucugaagaaagcucagaagguugacuguugcaugguuuccuuuccccuaguuuuucuaacacagaauccuccucggccggcaagcugcacuuuuuccccguuccugugacgguuucuggugaaaucaugaaaguaggugcagcugacugccccacauccugcagagauucuaaaugggaauccucacuuauuccuuuuuguguuugugcaauuuccaugucuuuaauuggaacugguguugccucuguuucugagagugguggaacaucuuuggcuggagucacauuguuggccagggucagaaccccauccuuagccaggggugcuucuguuuugagggcugggaccugauccucagucagggccaccuccauuucuggaggcagacauacguucuugaugagaacuacuucuguuucuggagguggagucacauccuugcccagagccauuucuguuucugauaguggagacauguccuucaacaagcccacuucuuuuacuguggacggagccacauccuuggccggggcuauuucuguuucugggaguugagccauguccuugacuggggccaccucugcuucuaaagguagugcuuuauccuuggucaagaucacguugguuuccgggggcagugucaugucccuggccagggcuaccucuguuucugaggacaaagccaccuucucagcagaggauauuucuguggaugauauaaugucauuagccugugccaccucuauuucugagaguaauaccaaauccuuggcugggacuaucuuguuuucuuuggguggucccauguccuuggaaggagccaaguccauuuuuauaggagaugcccucucuguuucuuucuuguuuucuuuggguggucccauguccuuggaaggggcuaaguccauuuuuauaggagaugcccucucuguuucuuucaacagugucacauccuuggcuggggcuaccucuguuucugugggcaguaccacauucuuggcugaagauacaucuguuucugugggccaucugacauccuuaaccagggccacuucuuuuucuguggguaguuccauguccuugacuagggccauaucugauuccauggauggcugcauguccuuggccagugucacaucuaauuuggugggugauuccauaucuuuagccaaugccaccucgguuuuuguagcuagugccauguccuuggcgagggccaucucuguuucuuuagauggugccaugucaguagucuucagucccaucauuauuuccaaugcuugugcugguggccucucuucugaugccauuucuaucuccuuggcuagcucuaagggaacugccguuggcugaggagguucugcaacagccucuggggaaacaaaggacucugaguguggagaguuuaaggcuuccacagaccaccccugagguacaacagcuguguugcagggagacauaccguaacugucuuucaagggaucauuuuguccugcaaauauugaaguaucagcugucgcacuggagggaaagaccaaaucugccaggucaucaucaugguacaucuuaaagggaucagucuggauaggaucgaccacuugcucagguuggaaacaaaaguugguaucuucuggccaguucuggcuauuuggguauuccugguaggccauuuucucuucaaggaauucaguuggagacccaagcuucucuggcucaucgggcccugugccugcaaugcagcugcucuccagaccguaggugggauccacuuucccagaggcucgugcugcuucuuguacuuucuugacaugagcuucaaccaauuccagugguaccuccucccggacccgagaaaacuccuccaaagccgcuuuugcugcagcagaugccacgcgaggguccaccacagaugccaaaaaagcaacaguacucauaacuggauuuccugacugacugaaggggacaggcugguaggccaaaggcccaagggaagcaucugaauucucaagguauggguccucaaugggaagucucaaaaaguggaggaugcauucauccugaguacgacuuccaacauguuccgacacuuuguuccaaucauccuuguacaucuccagggccuccaggaguagaagggucuccuguucaguccauucucuuccagcacuagcaccuuuacucuuugcuaauguuuucuuggaguaaaugucaguacggagaccaaaguucugcaaaucaacugguuuuuccuuguuuuucucaggaaaauuuagcaucuguugagcagcaggaaccugaggugaucgaagaugcagaggcacaagcccagaggggguaucagcuaauacauuaaaaugaggaguaggaggaggucccauugccaugggucuacuuuccgggucaacuugguaauuaacgaguccccacugcucuaaaaaggcauggacccucaucacagcacacacaucuccagucaaguuccuccgacaagcagugcuaguuaaauacucuuggggguuuagacgauacgugucaaucauaaaauuucgauaugccaaguauauuucuggagucuuggauuuguuuuuuccauugaagaacucaggaagagcacgccguucaaucacaugaauacaguuauaaucaaaccaugaugcauaacuaggaauaauaaugugauuggucugcucugucacauuaucuuccccaaggucaacugaucgacucugaucaccuuuggcaggaucuucaucuuccuuuccuccugcugugacuguuucuucauccugcucaucuagauccgcuacaguuccuccuuuaacagguguauuuucacuaucuuucuuuagguucacauuuuugggaaguacuacuucuucuauauuggguacagguguugggucuuccauauccuugguuagaucuucuugcucaucuuccucuuucugacuucugcgcuucccauaaaggcuagcuuggccuuucuucccacucuucuuccgugauucuguuggugucggagggggaggcgaaggcgaauguuuccucuuucgagcauuagcugaugcuuuucuaucucuucuuucuggacuucugacuggcucuucauucuugguugaaauccgcugacgaaaacucacaggcuuccuauuuucauccaccucauaauccuccucauucauccauucauugaaaauaucaguguccaaaauccauuucacaugaaccuuccaugguuuuucuggaauugguggaucuucaauuucagcaucaacaucauuacuauggacccaaguaucauagcugucuggguaaaagccccaaugcacuaacacuugcuucucuuuucucaucaccggucucaaccauucuucaucgucuugugaggaagaauauggguaaauguggugggaagcuuuugacuucucauccguaaauguucccugaugucguuugaugauaucuuucaauuuguuagccaacuucagaucaaugucuggaaugagguagauguugggucuggucaaacaauuguucugcaccaauguuuuuucaauguucauaaacauuuccacauuacgauccauucgagauggguucuguaggucaaaccuccgccaucccuguucauuuuuauacuuguaagcagccccaagaaugugacauaaggcgccuccagcuuugaaauccaugaaacacuuugcagggaguuuggugaaggccggguuggugacaugcuucccaaaggcaucuuccuggaacugaagaagcugcaccaccagcccagccaguguuuuauugguaggagcauccgcaugaacauacuucuuguagugcuugcccagccagacccgcaccgaauccagcugggacaccgucuccgggcucucccaaaacuugguggccgggcccccauccuuccgucgauaaacagcuaggccugcggcugccgccgcaauccccgagcccguggcgccuaccgcuguccccggcccgccgccgcccgccgcugcggccaucgucgcagcccgucguccccacagccuggcccaccccggcccucgcgguguuucccggucguucccgcgcgcacccccgcgcgcguagccgccacugccgcuucccggccccgcccag

SEQ ID NO: 2086 - RNA, 7656 nt, Homo sapiens
cugcgugaugggacaucaggcagcuuuauuuauuuacucuuaaaacuguuacaacagaaucauggacugacacagguaauggcugagccauaagcaaaucgagaaguacagaaaugucccaccccaaacagcugcggaguacacaucacacagggccucuggucccggccuucucaggugcucuggaguggaggauccuuugagggaacucugaccacuccuguugucuaccuagagagcacgccacuugggccaccuacccccaaccuuuggccaaaggagugaaaggaccuggaaccugucgucaaccucagcauccucaugaccccaggacagacgcaguggaggcagcagguacucugggccugugcuguugccccugaggugucuccugacuacgcaacccuguuuccuucccacuuucaucccagcaggcccuuucuuccugcugacaaaacacuggcucccucauguucuuggcacagcagaaguguucugcacauggucucuacggaggaaagcuggucccccuggcccaggcagcacuuccuccgugagccccugcaguuuccuggugugugcuuggggagcuagggacauggugucaaaccuccacaaggcacugcuaccucagaaagggggaggaccugucaggcccaggacagccucccugcacauggagaucaaaucuaaacuuaggucaagaccccuaccuucuccagggaugccaggaccagagaagggcagaggucaggagggggcaugaggaggccaagucuggggcagccuccucagaggcaaaucuacacugcagccaaucccccuccagagaagcccuuggaaucucccaggccauuucacuacaaacuuauguuugaauccuuuauuagaaaccaugcaaacuuuaauacaaaaaauacaagugcaauaagaaucuuugugucaauacaguucccgggauuucuccucacugcagccaucccaaggccuagcugggaugcccucugugggccuugccucuccucccuccccucuccagucagggcauaagggaagcagauagccuuagucucaugccuuuuauuuuuaaauuuccagaccugauuuccuacuaucugcaugaggcucccuuggacaugagggcuuacauguccuagggugugggugccggccugaaggaauuccaucuccuggcccuuucuuguucuccagcccuggcuuuuuauccuagggcugaccaccagaucccagggaaugggacagagaugccaaaaccagccucuugguuagaaaagaaaagcagcauacacacaacaaaauggcaaaaccaaccaguccacgcuccaagggccccuugugugccugaccggcucaccagccacagccucugcaccccucuucccugccgcaccgccuccagggcccuaagcugcccacauccuccagcggggguggcauaaggauaucuccgcccuguucccucuaacacuuacugaggacuuucauguagacauggcuucaaccugcagaacuauuuugccaguuuuuagguuauuagaaaaaaauaaaaggacaaaacaagaaaaaugugacagcagcuaggcggguauguuaagcauggggacaggcagcacugacccccaacuuggggcagggcagcaagaagggcccgacaccaccugcauggggaggggggggcgcccauuugugggaccagagggagaggcaguggcuuaagcuccacggucagcguccugucaccacucggaauccaccuccacucuucccuccagguagauccagggagaagggagggcaugucaguuucuuuuggguuuggaccaaagaaccaaaaaaagaugaggauagaaucugguucuccucuccuagaucccaacuuagccucaaccaccccaacccccucccaaccuccuccacggagcaguggcgcagugauggggcaagaccaaagcagggagaugggcccaggcuggggagugagaggagguguggggcagggcugcugcugccccgggcacgcaaagcaggagggaaggcgagccuagcgggcugcccagcacggcgcccaagcgcucacuggucuaguggacagcccgggaaagggggccaaggacccgggagcccgaguuggggccgccagggaaguguggggggcgggagacaaugucggccccguggucggugcgggcccuggcauuugcccggaacgucagccuguaggucucaaucuucacagcaccuccugcagguagguggcccacauuaucgagggaucccaccuuggccugggccuucuccuugaaguucaacuucugacuuucaaucuugacaucuccuccaccaggcuugugcuugauguuagccuuagacccacacuuggaggagaccuuagagauguccacuuucuuguucugaaucugaacauuaccaccuccagggacaugcuuaauauuguccuuggaaccacacuuggacugaauauggcuguagcucacuuuuuuggagacuaucuggacuuuccccgcagguuguuucugugcacuugcaauugggccggcuguuuuagugacugcauuagauucaggcuuucggguuguagcagcugccucuguuuuuuucucuacuuuggcccggccuccuccaggcugaugcuugauguuuuccguggagccaaccuuggagcggacauucuucagaucaggagcagaaguauugguggccaggcggcugagccggggggugguggagcuggguuuggccgaggugggcuucuugucuaugaaaggaguuguggagggccgggagggcauggguguggccuugacucggcugggaaccaccccugcagcgggggcugucccacugagaguggugguuuucuucauggaacugguggaggugcucuuugggcgacucaagucagcugguacagacuuugcagucaucuucuugacuucugcagguuuucccucagucuuaauggcagugggcuucuugggcaggagcguggaggggcuccuacugcuugggccaguugaggcaacagcagcagcuguugugguuuuugcaacagucugagugcucuuggacccagaucuggaggcuggggcagaagcuggcuuggauggugaggcccgcuucucaggagccuuugcaucugcaaugggcuuuggcuucacgucuuuugaagguaagauggaaggccuggcagaggcgacggcagggcguuuggguggggcagcuggcacuaagccugaagcaaggcucauggguuuuuuauucaacccaccaaugguggugggagcuggcugcuuagggagagaagugggcuguguuuuggcuuucgauguugaagucuuugcagguugagugguggccaaaggcuuuguuuucuucucugggcuuggugggagcuccuuguucggugggguggugaugucauuuccugucccacucaccacaggccuuccuucuucuggccuggcuauuccugaggucucugaagaaagcucagaagguugacuguugcaugguuuccuuuccccuaguuuuucuaacacagaauccuccucggccggcaagcugcacuuuuuccccguuccugugacgguuucuggugaaaucaugaaaguaggugcagcugacugccccacauccugcagagauucuaaaugggaauccucacuuauuccuuuuuguguuugugcaauuuccaugucuuuaauuggaacugguguugccucuguuucugagagugguggaacaucuuuggcuggagucacauuguuggccagggucagaaccccauccuuagccaggggugcuucuguuuugagggcugggaccugauccucagucagggccaccuccauuucuggaggcagacauacguucuugaugagaacuacuucuguuucuggagguggagucacauccuugcccagagccauuucuguuucugauaguggagacauguccuucaacaagcccacuucuuuuacuguggacggagccacauccuuggccggggcuauuucuguuucugggaguugagccauguccuugacuggggccaccucugcuucuaaagguagugcuuuauccuuggucaagaucacguugguuuccgggggcagugucaugucccuggccagggcuaccucuguuucugaggacaaagccaccuucucagcagaggauauuucuguggaugauauaaugucauuagccugugccaccucuauuucugagaguaauaccaaauccuuggcugggacuaucuuguuuucuuuggguggucccauguccuuggaaggagccaaguccauuuuuauaggagaugcccucucuguuucuuucuuguuuucuuuggguggucccauguccuuggaaggggcuaaguccauuuuuauaggagaugcccucucuguuucuuucaacagugucacauccuuggcuggggcuaccucuguuucugugggcaguaccacauucuuggcugaagauacaucuguuucugugggccaucugacauccuuaaccagggccacuucuuuuucuguggguaguuccauguccuugacuagggccauaucugauuccauggauggcugcauguccuuggccagugucacaucuaauuuggugggugauuccauaucuuuagccaaugccaccucgguuuuuguagcuagugccauguccuuggcgagggccaucucuguuucuuuagauggugccaugucaguagucuucagucccaucauuauuuccaaugcuugugcugguggccucucuucugaugccauuucuaucuccuuggcuagcucuaagggaacugccguuggcugaggagguucugcaacagccucuggggaaacaaaggacucugaguguggagaguuuaaggcuuccacagaccaccccugagguacaacagcuguguugcagggagacauaccguaacugucuuucaagggaucauuuuguccugcaaauauugaaguaucagcugucgcacuggagggaaagaccaaaucugccaggucaucaucaugguacaucuuaaagggaucagucuggauaggaucgaccacuugcucagguuggaaacaaaaguugguaucuucuggccaguucuggcuauuuggguauuccugguaggccauuuucucuucaaggaauucaguuggagacccaagcuucucuggcucaucgggcccugugccugcaaugcagcugcucuccagaccguaggugggauccacuuucccagaggcucgugcugcuucuuguacuuucuugacaugagcuucaaccaauuccagugguaccuccucccggacccgagaaaacuccuccaaagccgcuuuugcugcagcagaugccacgcgaggguccaccacagaugccaaaaaagcaacaguacucauaacuggauuuccugacugacugaaggggacaggcugguaggccaaaggcccaagggaagcaucugaauucucaagguauggguccucaaugggaagucucaaaaaguggaggaugcauucauccugaguacgacuuccaacauguuccgacacuuuguuccaaucauccuuguacaucuccagggccuccaggaguagaagggucuccuguucaguccauucucuuccagcacuagcaccuuuacucuuugcuaauguuuucuuggaguaaaugucaguacggagaccaaaguucugcaaaucaacugguuuuuccuuguuuuucucaggaaaauuuagcaucuguugagcagcaggaaccugaggugaucgaagaugcagaggcacaagcccagaggggguaucagcuaauacauuaaaaugaggaguaggaggaggucccauugccaugggucuacuuuccgggucaacuugguaauuaacgaguccccacugcucuaaaaaggcauggacccucaucacagcacacacaucuccagucaaguuccuccgacaagcagugcuaguuaaauacucuuggggguuuagacgauacgugucaaucauaaaauuucgauaugccaaguauauuucuggagucuuggauuuguuuuuuccauugaagaacucaggaagagcacgccguucaaucacaugaauacaguuauaaucaaaccaugaugcauaacuaggaauaauaaugugauuggucugcucugucacauuaucuuccccaaggucaacugaucgacucugaucaccuuuggcaggaucuucaucuuccuuuccuccugcugugacuguuucuucauccugcucaucuagauccgcuacaguuccuccuuuaacagguguauuuucacuaucuuucuuuagguucacauuuuugggaaguacuacuucuucuauauuggguacagguguugggucuuccauauccuugguuagaucuucuugcucaucuuccucuuucugacuucugcgcuucccauaaaggcuagcuuggccuuucuucccacucuucuuccgugauucuguuggugucggagggggaggcgaaggcgaauguuuccucuuucgagcauuagcugaugcuuuucuaucucuucuuucuggacuucugacuggcucuucauucuugguugaaauccgcugacgaaaacucacaggcuuccuauuuucauccaccucauaauccuccucauucauccauucauugaaaauaucaguguccaaaauccauuucacaugaaccuuccaugguuuuucuggaauugguggaucuucaauuucagcaucaacaucauuacuauggacccaaguaucauagcugucuggguaaaagccccaaugcacuaacacuugcuucucuuuucucaucaccggucucaaccauucuucaucgucuugugaggaagaauauggguaaauguggugggaagcuuuugacuucucauccguaaauguucccugaugucguuugaugauaucuuucaauuuguuagccaacuucagaucaaugucuggaaugagguagauguugggucuggucaaacaauuguucugcaccaauguuuuuucaauguucauaaacauuuccacauuacgauccauucgagauggguucuguaggucaaaccuccgccaucccuguucauuuuuauacuuguaagcagccccaagaaugugacauaaggcgccuccagcuuugaaauccaugaaacacuuugcagggaguuuggugaaggccggguuggugacaugcuucccaaaggcaucuuccuggaacugaagaagcugcaccaccagcccagccaguguuuuauugguaggagcauccgcaugaacauacuucuuguagugcuugcccagccagacccgcaccgaauccagcugggacaccgucuccgggcucucccaaaacuugguggccgggcccccauccuuccgucgauaaacagcuaggccugcggcugccgccgcaauccccgagcccguggcgccuaccgcuguccccggcccgccgccgcccgccgcugcggccaucgucgcagcccgucguccccacagccuggcccaccccggcccucgcgguguuucccggucguucccgcgcgcacccccgcgcgcguagccgccacugccgcuucccggccccgcccag

SEQ ID NO: 2087 - RNA, 5721 nt, Homo sapiens
cugcgugaugggacaucaggcagcuuuauuuauuuacucuuaaaacuguuacaacagaaucauggacugacacagguaauggcugagccauaagcaaaucgagaaguacagaaaugucccaccccaaacagcugcggaguacacaucacacagggccucuggucccggccuucucaggugcucuggaguggaggauccuuugagggaacucugaccacuccuguugucuaccuagagagcacgccacuugggccaccuacccccaaccuuuggccaaaggagugaaaggaccuggaaccugucgucaaccucagcauccucaugaccccaggacagacgcaguggaggcagcagguacucugggccugugcuguugccccugaggugucuccugacuacgcaacccuguuuccuucccacuuucaucccagcaggcccuuucuuccugcugacaaaacacuggcucccucauguucuuggcacagcagaaguguucugcacauggucucuacggaggaaagcuggucccccuggcccaggcagcacuuccuccgugagccccugcaguuuccuggugugugcuuggggagcuagggacauggugucaaaccuccacaaggcacugcuaccucagaaagggggaggaccugucaggcccaggacagccucccugcacauggagaucaaaucuaaacuuaggucaagaccccuaccuucuccagggaugccaggaccagagaagggcagaggucaggagggggcaugaggaggccaagucuggggcagccuccucagaggcaaaucuacacugcagccaaucccccuccagagaagcccuuggaaucucccaggccauuucacuacaaacuuauguuugaauccuuuauuagaaaccaugcaaacuuuaauacaaaaaauacaagugcaauaagaaucuuugugucaauacaguucccgggauuucuccucacugcagccaucccaaggccuagcugggaugcccucugugggccuugccucuccucccuccccucuccagucagggcauaagggaagcagauagccuuagucucaugccuuuuauuuuuaaauuuccagaccugauuuccuacuaucugcaugaggcucccuuggacaugagggcuuacauguccuagggugugggugccggccugaaggaauuccaucuccuggcccuuucuuguucuccagcccuggcuuuuuauccuagggcugaccaccagaucccagggaaugggacagagaugccaaaaccagccucuugguuagaaaagaaaagcagcauacacacaacaaaauggcaaaaccaaccaguccacgcuccaagggccccuugugugccugaccggcucaccagccacagccucugcaccccucuucccugccgcaccgccuccagggcccuaagcugcccacauccuccagcggggguggcauaaggauaucuccgcccuguucccucuaacacuuacugaggacuuucauguagacauggcuucaaccugcagaacuauuuugccaguuuuuagguuauuagaaaaaaauaaaaggacaaaacaagaaaaaugugacagcagcuaggcggguauguuaagcauggggacaggcagcacugacccccaacuuggggcagggcagcaagaagggcccgacaccaccugcauggggaggggggggcgcccauuugugggaccagagggagaggcaguggcuuaagcuccacggucagcguccugucaccacucggaauccaccuccacucuucccuccagguagauccagggagaagggagggcaugucaguuucuuuuggguuuggaccaaagaaccaaaaaaagaugaggauagaaucugguucuccucuccuagaucccaacuuagccucaaccaccccaacccccucccaaccuccuccacggagcaguggcgcagugauggggcaagaccaaagcagggagaugggcccaggcuggggagugagaggagguguggggcagggcugcugcugccccgggcacgcaaagcaggagggaaggcgagccuagcgggcugcccagcacggcgcccaagcgcucacuggucuaguggacagcccgggaaagggggccaaggacccgggagcccgaguuggggccgccagggaaguguggggggcgggagacaaugucggccccguggucggugcgggcccuggcauuugcccggaacgucagccuguaggucucaaucuucacagcaccuccugcagguagguggcccacauuaucgagggaucccaccuuggccugggccuucuccuugaaguucaacuucugacuuucaaucuugacaucuccuccaccaggcuugugcuugauguuagccuuagacccacacuuggaggagaccuuagagauguccacuuucuuguucugaaucugaacauuaccaccuccagggacaugcuuaauauuguccuuggaaccacacuuggacugaauauggcuguagcucacuuuuuuggagacuaucuggacuuuccccgcagguuguuucugugcacuugcaauugggccggcuguuuuagugacugcauuagauucaggcuuucggguuguagcagcugccucuguuuuuuucucuacuuuggcccggccuccuccaggcugaugcuugauguuuuccguggagccaaccuuggagcggacauucuucagaucaggagcagaaguauugguggccaggcggcugagccggggggugguggagcuggguuuggccgaggugggcuucuugucuaugaaaggaguuguggagggccgggagggcauggguguggccuugacucggcugggaaccaccccugcagcgggggcugucccacugagaguggugguuuucuucauggaacugguggaggugcucuuugggcgacucaagucagcugguacagacuuugcagucaucuucuugacuucugcagguuuucccucagucuuaauggcagugggcuucuugggcaggagcguggaggggcuccuacugcuugggccaguugaggcaacagcagcagcuguugugguuuuugcaacagucugagugcucuuggacccagaucuggaggcuggggcagaagcuggcuuggauggugaggcccgcuucucaggagccuuugcaucugcaaugggcuuuggcuucacgucuuuugaagguaagauggaaggccuggcagaggcgacggcagggcguuuggguggggcagcuggcacuaagccugaagcaaggcucauggguuuuuuauucaacccaccaaugguggugggagcuggcugcuuagggagagaagugggcuguguuuuggcuuucgauguugaagucuuugcagguugagugguggccaaaggcuuuguuuucuucucugggcuuggugggagcuccuuguucggugggguggugaugucauuuccugucccacucaccacaggccuuccuucuucuggccuggcuauuccaagcuucucuggcucaucgggcccugugccugcaaugcagcugcucuccagaccguaggugggauccacuuucccagaggcucgugcugcuucuuguacuuucuugacaugagcuucaaccaauuccagugguaccuccucccggacccgagaaaacuccuccaaagccgcuuuugcugcagcagaugccacgcgaggguccaccacagaugccaaaaaagcaacaguacucauaacuggauuuccugacugacugaaggggacaggcugguaggccaaaggcccaagggaagcaucugaauucucaagguauggguccucaaugggaagucucaaaaaguggaggaugcauucauccugaguacgacuuccaacauguuccgacacuuuguuccaaucauccuuguacaucuccagggccuccaggaguagaagggucuccuguucaguccauucucuuccagcacuagcaccuuuacucuuugcuaauguuuucuuggaguaaaugucaguacggagaccaaaguucugcaaaucaacugguuuuuccuuguuuuucucaggaaaauuuagcaucuguugagcagcaggaaccugaggugaucgaagaugcagaggcacaagcccagaggggguaucagcuaauacauuaaaaugaggaguaggaggaggucccauugccaugggucuacuuuccgggucaacuugguaauuaacgaguccccacugcucuaaaaaggcauggacccucaucacagcacacacaucuccagucaaguuccuccgacaagcagugcuaguuaaauacucuuggggguuuagacgauacgugucaaucauaaaauuucgauaugccaaguauauuucuggagucuuggauuuguuuuuuccauugaagaacucaggaagagcacgccguucaaucacaugaauacaguuauaaucaaaccaugaugcauaacuaggaauaauaaugugauuggucugcucugucacauuaucuuccccaaggucaacugaucgacucugaucaccuuuggcaggaucuucaucuuccuuuccuccugcugugacuguuucuucauccugcucaucuagauccgcuacaguuccuccuuuaacagguguauuuucacuaucuuucuuuagguucacauuuuugggaaguacuacuucuucuauauuggguacagguguugggucuuccauauccuugguuagaucuucuugcucaucuuccucuuucugacuucugcgcuucccauaaaggcuagcuuggccuuucuucccacucuucuuccgugauucuguuggugucggagggggaggcgaaggcgaauguuuccucuuucgagcauuagcugaugcuuuucuaucucuucuuucuggacuucugacuggcucuucauucuugguugaaauccgcugacgaaaacucacaggcuuccuauuuucauccaccucauaauccuccucauucauccauucauugaaaauaucaguguccaaaauccauuucacaugaaccuuccaugguuuuucuggaauugguggaucuucaauuucagcaucaacaucauuacuauggacccaaguaucauagcugucuggguaaaagccccaaugcacuaacacuugcuucucuuuucucaucaccggucucaaccauucuucaucgucuugugaggaagaauauggguaaauguggugggaagcuuuugacuucucauccguaaauguucccugaugucguuugaugauaucuuucaauuuguuagccaacuucagaucaaugucuggaaugagguagauguugggucuggucaaacaauuguucugcaccaauguuuuuucaauguucauaaacauuuccacauuacgauccauucgagauggguucuguaggucaaaccuccgccaucccuguucauuuuuauacuuguaagcagccccaagaaugugacauaaggcgccuccagcuuugaaauccaugaaacacuuugcagggaguuuggugaaggccggguuggugacaugcuucccaaaggcaucuuccuggaacugaagaagcugcaccaccagcccagccaguguuuuauugguaggagcauccgcaugaacauacuuggaauagcacguccugcggccucagccgccucuuccgccauccuccguaggcugcauucugcccuagugagcgccgguuuuu

SEQ ID NO: 2088 - RNA, 5391 nt, Homo sapiens
cugcgugaugggacaucaggcagcuuuauuuauuuacucuuaaaacuguuacaacagaaucauggacugacacagguaauggcugagccauaagcaaaucgagaaguacagaaaugucccaccccaaacagcugcggaguacacaucacacagggccucuggucccggccuucucaggugcucuggaguggaggauccuuugagggaacucugaccacuccuguugucuaccuagagagcacgccacuugggccaccuacccccaaccuuuggccaaaggagugaaaggaccuggaaccugucgucaaccucagcauccucaugaccccaggacagacgcaguggaggcagcagguacucugggccugugcuguugccccugaggugucuccugacuacgcaacccuguuuccuucccacuuucaucccagcaggcccuuucuuccugcugacaaaacacuggcucccucauguucuuggcacagcagaaguguucugcacauggucucuacggaggaaagcuggucccccuggcccaggcagcacuuccuccgugagccccugcaguuuccuggugugugcuuggggagcuagggacauggugucaaaccuccacaaggcacugcuaccucagaaagggggaggaccugucaggcccaggacagccucccugcacauggagaucaaaucuaaacuuaggucaagaccccuaccuucuccagggaugccaggaccagagaagggcagaggucaggagggggcaugaggaggccaagucuggggcagccuccucagaggcaaaucuacacugcagccaaucccccuccagagaagcccuuggaaucucccaggccauuucacuacaaacuuauguuugaauccuuuauuagaaaccaugcaaacuuuaauacaaaaaauacaagugcaauaagaaucuuugugucaauacaguucccgggauuucuccucacugcagccaucccaaggccuagcugggaugcccucugugggccuugccucuccucccuccccucuccagucagggcauaagggaagcagauagccuuagucucaugccuuuuauuuuuaaauuuccagaccugauuuccuacuaucugcaugaggcucccuuggacaugagggcuuacauguccuagggugugggugccggccugaaggaauuccaucuccuggcccuuucuuguucuccagcccuggcuuuuuauccuagggcugaccaccagaucccagggaaugggacagagaugccaaaaccagccucuugguuagaaaagaaaagcagcauacacacaacaaaauggcaaaaccaaccaguccacgcuccaagggccccuugugugccugaccggcucaccagccacagccucugcaccccucuucccugccgcaccgccuccagggcccuaagcugcccacauccuccagcggggguggcauaaggauaucuccgcccuguucccucuaacacuuacugaggacuuucauguagacauggcuucaaccugcagaacuauuuugccaguuuuuagguuauuagaaaaaaauaaaaggacaaaacaagaaaaaugugacagcagcuaggcggguauguuaagcauggggacaggcagcacugacccccaacuuggggcagggcagcaagaagggcccgacaccaccugcauggggaggggggggcgcccauuugugggaccagagggagaggcaguggcuuaagcuccacggucagcguccugucaccacucggaauccaccuccacucuucccuccagguagauccagggagaagggagggcaugucaguuucuuuuggguuuggaccaaagaaccaaaaaaagaugaggauagaaucugguucuccucuccuagaucccaacuuagccucaaccaccccaacccccucccaaccuccuccacggagcaguggcgcagugauggggcaagaccaaagcagggagaugggcccaggcuggggagugagaggagguguggggcagggcugcugcugccccgggcacgcaaagcaggagggaaggcgagccuagcgggcugcccagcacggcgcccaagcgcucacuggucuaguggacagcccgggaaagggggccaaggacccgggagcccgaguuggggccgccagggaaguguggggggcgggagacaaugucggccccguggucggugcgggcccuggcauuugcccggaacgucagccuguaggucucaaucuucacagcaccuccugcagguagguggcccacauuaucgagggaucccaccuuggccugggccuucuccuugaaguucaacuucugacuuucaaucuugacaucuccuccaccaggcuugugcuugauguuagccuuagacccacacuuggaggagaccuuagagauguccacuuucuuguucugaaucugaacauuaccaccuccagggacaugcuuaauauuguccuuggaaccacacuuggacugaauauggcuguagcucacuuuuuuggagacuaucuggacccggccuccuccaggcugaugcuugauguuuuccguggagccaaccuuggagcggacauucuucagaucaggagcagaaguauugguggccaggcggcugagccggggggugguggagcuggguuuggccgaggugggcuucuugucuaugaaaggaguuguggagggccgggagggcauggguguggccuugacucggcugggaaccaccccugcagcgggggcugucccacugagaguggugguuuucuucauggaacugguggaggugcucuuugggcgacucaagucagcugguacagacuuugcagucaucuucuugacuucugcagguuuucccucagucuuaauggcagugggcuucuugggcaggagcguggaggggcuccuacugcuugggccaguugaggcaacagcagcagcuguugugguuuuugcaacagucugagugcucuuggacccagaucuggaggcuggggcagaagcuggcuuggauggugaggcccgcuucucaggagccuuugcaucugcaaugggcuuuguuuucuucucugggcuuggugggagcuccuuguucggugggguggugaugucauuuccugucccacucaccacaggccuuccuucuucuggccuggcuauuccaagcuucucuggcucaucgggcccugugccugcaaugcagcugcucuccagaccguaggugggauccacuuucccagaggcucgugcugcuucuuguacuuucuugacaugagcuucaaccaauuccagugguaccuccucccggacccgagaaaacuccuccaaagccgcuuuugcugcagcagaugccacgcgaggguccaccacagaugccaaaaaagcaacaguacucauaacuggauuuccugacugacugaaggggacaggcugguaggccaaaggcccaagggaagcaucugaauucucaagguauggguccucaaugggaagucucaaaaaguggaggaugcauucauccugaguacgacuuccaacauguuccgacacuuuguuccaaucauccuuguacaucuccagggccuccaggaguagaagggucuccuguucaguccauucucuuccagcacuagcaccuuuacucuuugcuaauguuuucuuggaguaaaugucaguacggagaccaaaguucugcaaaucaacugguuuuuccuuguuuuucucaggaaaauuuagcaucuguugagcagcaggaaccugaggugaucgaagaugcagaggcacaagcccagaggggguaucagcuaauacauuaaaaugaggaguaggaggaggucccauugccaugggucuacuuuccgggucaacuugguaauuaacgaguccccacugcucuaaaaaggcauggacccucaucacagcacacacaucuccagucaaguuccuccgacaagcagugcuaguuaaauacucuuggggguuuagacgauacgugucaaucauaaaauuucgauaugccaaguauauuucuggagucuuggauuuguuuuuuccauugaagaacucaggaagagcacgccguucaaucacaugaauacaguuauaaucaaaccaugaugcauaacuaggaauaauaaugugauuggucugcucugucacauuaucuuccccaaggucaacugaucgacucugaucaccuuuggcaggaucuucaucuuccuuuccuccugcugugacuguuucuucauccugcucaucuagauccgcuacaguuccuccuuuaacagguguauuuucacuaucuuucuuuagguucacauuuuugggaaguacuacuucuucuauauuggguacagguguugggucuuccauauccuugguuagaucuucuugcucaucuuccucuuucugacuucugcgcuucccauaaaggcuagcuuggccuuucuucccacucuucuuccgugauucuguuggugucggagggggaggcgaaggcgaauguuuccucuuucgagcauuagcugaugcuuuucuaucucuucuuucuggacuucugacuggcucuucauucuugguugaaauccgcugacgaaaacucacaggcuuccuauuuucauccaccucauaauccuccucauucauccauucauugaaaauaucaguguccaaaauccauuucacaugaaccuuccaugguuuuucuggaauugguggaucuucaauuucagcaucaacaucauuacuauggacccaaguaucauagcugucuggguaaaagccccaaugcacuaacacuugcuucucuuuucucaucaccggucucaaccauucuucaucgucuugugaggaagaauauggguaaauguggugggaagcuuuugacuucucauccguaaauguucccugaugucguuugaugauaucuuucaauuuguuagccaacuucagaucaaugucuggaaugagguagauguugggucuggucaaacaauuguucugcaccaauguuuuuucaauguucauaaacauuuccacauuacgauccauucgagauggguucuguaggucaaaccuccgccaucccuguucauuuuuauacuuguaagcagccccaagaaugugacauaaggcgccuccagcuuugaaauccaugaaacacuuugcagggaguuuggugaaggccggguuggugacaugcuucccaaaggcaucuuccuggaacugaagaagcugcaccaccagcccagccaguguuuuauugguaggagcauccgcaugaacauacuuggaauagcacguccugcggccucagccgccucuuccgccauccuccguaggcugcauucugcccuagugagcgccgguuuuu

SEQ ID NO: 2089 - RNA, 5932 nt, Homo sapiens
cugcgugaugggacaucaggcagcuuuauuuauuuacucuuaaaacuguuacaacagaaucauggacugacacagguaauggcugagccauaagcaaaucgagaaguacagaaaugucccaccccaaacagcugcggaguacacaucacacagggccucuggucccggccuucucaggugcucuggaguggaggauccuuugagggaacucugaccacuccuguugucuaccuagagagcacgccacuugggccaccuacccccaaccuuuggccaaaggagugaaaggaccuggaaccugucgucaaccucagcauccucaugaccccaggacagacgcaguggaggcagcagguacucugggccugugcuguugccccugaggugucuccugacuacgcaacccuguuuccuucccacuuucaucccagcaggcccuuucuuccugcugacaaaacacuggcucccucauguucuuggcacagcagaaguguucugcacauggucucuacggaggaaagcuggucccccuggcccaggcagcacuuccuccgugagccccugcaguuuccuggugugugcuuggggagcuagggacauggugucaaaccuccacaaggcacugcuaccucagaaagggggaggaccugucaggcccaggacagccucccugcacauggagaucaaaucuaaacuuaggucaagaccccuaccuucuccagggaugccaggaccagagaagggcagaggucaggagggggcaugaggaggccaagucuggggcagccuccucagaggcaaaucuacacugcagccaaucccccuccagagaagcccuuggaaucucccaggccauuucacuacaaacuuauguuugaauccuuuauuagaaaccaugcaaacuuuaauacaaaaaauacaagugcaauaagaaucuuugugucaauacaguucccgggauuucuccucacugcagccaucccaaggccuagcugggaugcccucugugggccuugccucuccucccuccccucuccagucagggcauaagggaagcagauagccuuagucucaugccuuuuauuuuuaaauuuccagaccugauuuccuacuaucugcaugaggcucccuuggacaugagggcuuacauguccuagggugugggugccggccugaaggaauuccaucuccuggcccuuucuuguucuccagcccuggcuuuuuauccuagggcugaccaccagaucccagggaaugggacagagaugccaaaaccagccucuugguuagaaaagaaaagcagcauacacacaacaaaauggcaaaaccaaccaguccacgcuccaagggccccuugugugccugaccggcucaccagccacagccucugcaccccucuucccugccgcaccgccuccagggcccuaagcugcccacauccuccagcggggguggcauaaggauaucuccgcccuguucccucuaacacuuacugaggacuuucauguagacauggcuucaaccugcagaacuauuuugccaguuuuuagguuauuagaaaaaaauaaaaggacaaaacaagaaaaaugugacagcagcuaggcggguauguuaagcauggggacaggcagcacugacccccaacuuggggcagggcagcaagaagggcccgacaccaccugcauggggaggggggggcgcccauuugugggaccagagggagaggcaguggcuuaagcuccacggucagcguccugucaccacucggaauccaccuccacucuucccuccagguagauccagggagaagggagggcaugucaguuucuuuuggguuuggaccaaagaaccaaaaaaagaugaggauagaaucugguucuccucuccuagaucccaacuuagccucaaccaccccaacccccucccaaccuccuccacggagcaguggcgcagugauggggcaagaccaaagcagggagaugggcccaggcuggggagugagaggagguguggggcagggcugcugcugccccgggcacgcaaagcaggagggaaggcgagccuagcgggcugcccagcacggcgcccaagcgcucacuggucuaguggacagcccgggaaagggggccaaggacccgggagcccgaguuggggccgccagggaaguguggggggcgggagacaaugucggccccguggucggugcgggcccuggcauuugcccggaacgucagccuguaggucucaauuugucuccuggaucuggcuguccaaggucugggccucccuuuggucaccacccccugacagggugggguggccauugaggccacuggcugaagugggggcgccagcuucaggcgcugccucagagauggccggcuccuccccagcagggggacccggacacagaggagccucgcugccaccgcccucagucuucacagcaccuccugcagguagguggcccacauuaucgagggaucccaccuuggccugggccuucuccuugaaguucaacuucugacuuucaaucuugacaucuccuccaccaggcuugugcuugauguuagccuuagacccacacuuggaggagaccuuagagauguccacuuucuuguucugaaucugaacccggccuccuccaggcugaugcuugauguuuuccguggagccaaccuuggagcggacauucuucagaucaggagcagaaguauugguggccaggcggcugagccggggggugguggagcuggguuuggccgaggugggcuucuugucuaugaaaggaguuguggagggccgggagggcauggguguggccuugacucggcugggaaccaccccugcagcgggggcugucccacugagaguggugguuuucuucauggaacugguggaggugcucuuugggcgacucaagucagcugguacagacuuugcagucaucuucuugacuucugcagguuuucccucagucuuaauggcagugggcuucuugggcaggagcguggaggggcuccuacugcuugggccaguugaggcaacagcagcagcuguugugguuuuugcaacagucugagugcucuuggacccagaucuggaggcuggggcagaagcuggcuuggauggugaggcccgcuucucaggagccuuugcaucugcaaugggcuuuggcuucacgucuuuugaagguaagauggaaggccuggcagaggcgacggcagggcguuuggguggggcagcuggcacuaagccugaagcaaggcucauggguuuuuuauucaacccaccaaugguggugggagcuggcugcuuagggagagaagugggcuguguuuuggcuuucgauguugaagucuuugcagguugagugguggccaaaggcuuuguuuucuucucugggcuuggugggagcuccuuguucggugggguggugaugucauuuccugucccacucaccacaggccuuccuucuucuggccuggcuauuccaagcuucucuggcucaucgggcccugugccugcaaugcagcugcucuccagaccguaggugggauccacuuucccagaggcucgugcugcuucuuguacuuucuugacaugagcuucaaccaauuccagugguaccuccucccggacccgagaaaacuccuccaaagccgcuuuugcugcagcagaugccacgcgaggguccaccacagaugccaaaaaagcaacaguacucauaacuggauuuccugacugacugaaggggacaggcugguaggccaaaggcccaagggaagcaucugaauucucaagguauggguccucaaugggaagucucaaaaaguggaggaugcauucauccugaguacgacuuccaacauguuccgacacuuuguuccaaucauccuuguacaucuccagggccuccaggaguagaagggucuccuguucaguccauucucuuccagcacuagcaccuuuacucuuugcuaauguuuucuuggaguaaaugucaguacggagaccaaaguucugcaaaucaacugguuuuuccuuguuuuucucaggaaaauuuagcaucuguugagcagcaggaaccugaggugaucgaagaugcagaggcacaagcccagaggggguaucagcuaauacauuaaaaugaggaguaggaggaggucccauugccaugggucuacuuuccgggucaacuugguaauuaacgaguccccacugcucuaaaaaggcauggacccucaucacagcacacacaucuccagucaaguuccuccgacaagcagugcuaguuaaauacucuuggggguuuagacgauacgugucaaucauaaaauuucgauaugccaaguauauuucuggagucuuggauuuguuuuuuccauugaagaacucaggaagagcacgccguucaaucacaugaauacaguuauaaucaaaccaugaugcauaacuaggaauaauaaugugauuggucugcucugucacauuaucuuccccaaggucaacugaucgacucugaucaccuuuggcaggaucuucaucuuccuuuccuccugcugugacuguuucuucauccugcucaucuagauccgcuacaguuccuccuuuaacagguguauuuucacuaucuuucuuuagguucacauuuuugggaaguacuacuucuucuauauuggguacagguguugggucuuccauauccuugguuagaucuucuugcucaucuuccucuuucugacuucugcgcuucccauaaaggcuagcuuggccuuucuucccacucuucuuccgugauucuguuggugucggagggggaggcgaaggcgaauguuuccucuuucgagcauuagcugaugcuuuucuaucucuucuuucuggacuucugacuggcucuucauucuugguugaaauccgcugacgaaaacucacaggcuuccuauuuucauccaccucauaauccuccucauucauccauucauugaaaauaucaguguccaaaauccauuucacaugaaccuuccaugguuuuucuggaauugguggaucuucaauuucagcaucaacaucauuacuauggacccaaguaucauagcugucuggguaaaagccccaaugcacuaacacuugcuucucuuuucucaucaccggucucaaccauucuucaucgucuugugaggaagaauauggguaaauguggugggaagcuuuugacuucucauccguaaauguucccugaugucguuugaugauaucuuucaauuuguuagccaacuucagaucaaugucuggaaugagguagauguugggucuggucaaacaauuguucugcaccaauguuuuuucaauguucauaaacauuuccacauuacgauccauucgagauggguucuguaggucaaaccuccgccaucccuguucauuuuuauacuuguaagcagccccaagaaugugacauaaggcgccuccagcuuugaaauccaugaaacacuuugcagggaguuuggugaaggccggguuggugacaugcuucccaaaggcaucuuccuggaacugaagaagcugcaccaccagcccagccaguguuuuauugguaggagcauccgcaugaacauacuucuuguagugcuugcccagccagacccgcaccgaauccagcugggacaccgucuccgggcucucccaaaacuugguggccgggcccccauccuuccgucgauaaacagcuaggccugcggcugccgccgcaauccccgagcccguggcgccuaccgcuguccccggcccgccgccgcccgccgcugcggccaucgucgcagcccgucguccccacagccuggcccaccccggcccucgcgguguuucccggucguucccgcgcgcacccccgcgcgcguagccgccacugccgcuucccggccccgcccag

SEQ ID NO: 2090 - RNA, 2533 nt, Homo sapiens
cuuuggcuucacgucuuuugaagguaagauggaaggccuggcagaggcgacggcagggcguuuggguggggcagcuggcacuaagccugaagcaaggcucauggguuuuuuauucaacccaccaaugguggugggagcuggcugcuuagggagagaagugggcuguguuuuggcuuucgauguugaagucuuugcagguugagugguggccaaaggcuuuguuuucuucucugggcuuggugggagcuccuuguucggugggguggugaugucauuuccugucccacucaccacaggccuuccuucuucuggccuggcuauuccaagcuucucuggcucaucgggcccugugccugcaaugcagcugcucuccagaccguaggugggauccacuuucccagaggcucgugcugcuucuuguacuuucuugacaugagcuucaaccaauuccagugguaccuccucccggacccgagaaaacuccuccaaagccgcuuuugcugcagcagaugccacgcgaggguccaccacagaugccaaaaaagcaacaguacucauaacuggauuuccugacugacugaaggggacaggcugguaggccaaaggcccaagggaagcaucugaauucucaagguauggguccucaaugggaagucucaaaaaguggaggaugcauucauccugaguacgacuuccaacauguuccgacacuuuguuccaaucauccuuguacaucuccagggccuccaggaguagaagggucuccuguucaguccauucucuuccagcacuagcaccuuuacucuuugcuaauguuuucuuggaguaaaugucaguacggagaccaaaguucugcaaaucaacugguuuuuccuuguuuuucucaggaaaauuuagcaucuguugagcagcaggaaccugaggugaucgaagaugcagaggcacaagcccagaggggguaucagcuaauacauuaaaaugaggaguaggaggaggucccauugccaugggucuacuuuccgggucaacuugguaauuaacgaguccccacugcucuaaaaaggcauggacccucaucacagcacacacaucuccagucaaguuccuccgacaagcagugcuaguuaaauacucuuggggguuuagacgauacgugucaaucauaaaauuucgauaugccaaguauauuucuggagucuuggauuuguuuuuuccauugaagaacucaggaagagcacgccguucaaucacaugaauacaguuauaaucaaaccaugaugcauaacuaggaauaauaaugugauuggucugcucugucacauuaucuuccccaaggucaacugaucgacucugaucaccuuuggcaggaucuucaucuuccuuuccuccugcugugacuguuucuucauccugcucaucuagauccgcuacaguuccuccuuuaacagguguauuuucacuaucuuucuuuagguucacauuuuugggaaguacuacuucuucuauauuggguacagguguugggucuuccauauccuugguuagaucuucuugcucaucuuccucuuucugacuucugcgcuucccauaaaggcuagcuuggccuuucuucccacucuucuuccgugauucuguuggugucggagggggaggcgaaggcgaauguuuccucuuucgagcauuagcugaugcuuuucuaucucuucuuucuggacuucugacuggcucuucauucuugguugaaauccgcugacgaaaacucacaggcuuccuauuuucauccaccucauaauccuccucauucauccauucauugaaaauaucaguguccaaaauccauuucacaugaaccuuccaugguuuuucuggaauugguggaucuucaauuucagcaucaacaucauuacuauggacccaaguaucauagcugucuggguaaaagccccaaugcacuaacacuugcuucucuuuucucaucaccggucucaaccauucuucaucgucuugugaggaagaauauggguaaauguggugggaagcuuuugacuucucauccguaaauguucccugaugucguuugaugauaucuuucaauuuguuagccaacuucagaucaaugucuggaaugagguagauguugggucuggucaaacaauuguucugcaccaauguuuuuucaauguucauaaacauuuccacauuacgauccauucgagauggguucuguaggucaaaccuccgccaucccuguucauuuuuauacuuguaagcagccccaagaaugugacauaaggcgccuccagcuuugaaauccaugaaacacuuugcagggaguuuggugaaggccggguuggugacaugcuucccaaaggcaucuuccuggaacugaagaagcugcaccaccagcccagccaguguuuuauugguaggagcauccgcaugaacauacuuggaauagcacguccugcggccucagccgccucuuccgccauccuccguaggcugcauucugcccuagugagcgccgguuuuu

SEQ ID NO: 2091 - RNA, 4468 nt, Homo sapiens
cuuuggcuucacgucuuuugaagguaagauggaaggccuggcagaggcgacggcagggcguuuggguggggcagcuggcacuaagccugaagcaaggcucauggguuuuuuauucaacccaccaaugguggugggagcuggcugcuuagggagagaagugggcuguguuuuggcuuucgauguugaagucuuugcagguugagugguggccaaaggcuuuguuuucuucucugggcuuggugggagcuccuuguucggugggguggugaugucauuuccugucccacucaccacaggccuuccuucuucuggccuggcuauuccugaggucucugaagaaagcucagaagguugacuguugcaugguuuccuuuccccuaguuuuucuaacacagaauccuccucggccggcaagcugcacuuuuuccccguuccugugacgguuucuggugaaaucaugaaaguaggugcagcugacugccccacauccugcagagauucuaaaugggaauccucacuuauuccuuuuuguguuugugcaauuuccaugucuuuaauuggaacugguguugccucuguuucugagagugguggaacaucuuuggcuggagucacauuguuggccagggucagaaccccauccuuagccaggggugcuucuguuuugagggcugggaccugauccucagucagggccaccuccauuucuggaggcagacauacguucuugaugagaacuacuucuguuucuggagguggagucacauccuugcccagagccauuucuguuucugauaguggagacauguccuucaacaagcccacuucuuuuacuguggacggagccacauccuuggccggggcuauuucuguuucugggaguugagccauguccuugacuggggccaccucugcuucuaaagguagugcuuuauccuuggucaagaucacguugguuuccgggggcagugucaugucccuggccagggcuaccucuguuucugaggacaaagccaccuucucagcagaggauauuucuguggaugauauaaugucauuagccugugccaccucuauuucugagaguaauaccaaauccuuggcugggacuaucuuguuuucuuuggguggucccauguccuuggaaggagccaaguccauuuuuauaggagaugcccucucuguuucuuucuuguuuucuuuggguggucccauguccuuggaaggggcuaaguccauuuuuauaggagaugcccucucuguuucuuucaacagugucacauccuuggcuggggcuaccucuguuucugugggcaguaccacauucuuggcugaagauacaucuguuucugugggccaucugacauccuuaaccagggccacuucuuuuucuguggguaguuccauguccuugacuagggccauaucugauuccauggauggcugcauguccuuggccagugucacaucuaauuuggugggugauuccauaucuuuagccaaugccaccucgguuuuuguagcuagugccauguccuuggcgagggccaucucuguuucuuuagauggugccaugucaguagucuucagucccaucauuauuuccaaugcuugugcugguggccucucuucugaugccauuucuaucuccuuggcuagcucuaagggaacugccguuggcugaggagguucugcaacagccucuggggaaacaaaggacucugaguguggagaguuuaaggcuuccacagaccaccccugagguacaacagcuguguugcagggagacauaccguaacugucuuucaagggaucauuuuguccugcaaauauugaaguaucagcugucgcacuggagggaaagaccaaaucugccaggucaucaucaugguacaucuuaaagggaucagucuggauaggaucgaccacuugcucagguuggaaacaaaaguugguaucuucuggccaguucuggcuauuuggguauuccugguaggccauuuucucuucaaggaauucaguuggagacccaagcuucucuggcucaucgggcccugugccugcaaugcagcugcucuccagaccguaggugggauccacuuucccagaggcucgugcugcuucuuguacuuucuugacaugagcuucaaccaauuccagugguaccuccucccggacccgagaaaacuccuccaaagccgcuuuugcugcagcagaugccacgcgaggguccaccacagaugccaaaaaagcaacaguacucauaacuggauuuccugacugacugaaggggacaggcugguaggccaaaggcccaagggaagcaucugaauucucaagguauggguccucaaugggaagucucaaaaaguggaggaugcauucauccugaguacgacuuccaacauguuccgacacuuuguuccaaucauccuuguacaucuccagggccuccaggaguagaagggucuccuguucaguccauucucuuccagcacuagcaccuuuacucuuugcuaauguuuucuuggaguaaaugucaguacggagaccaaaguucugcaaaucaacugguuuuuccuuguuuuucucaggaaaauuuagcaucuguugagcagcaggaaccugaggugaucgaagaugcagaggcacaagcccagaggggguaucagcuaauacauuaaaaugaggaguaggaggaggucccauugccaugggucuacuuuccgggucaacuugguaauuaacgaguccccacugcucuaaaaaggcauggacccucaucacagcacacacaucuccagucaaguuccuccgacaagcagugcuaguuaaauacucuuggggguuuagacgauacgugucaaucauaaaauuucgauaugccaaguauauuucuggagucuuggauuuguuuuuuccauugaagaacucaggaagagcacgccguucaaucacaugaauacaguuauaaucaaaccaugaugcauaacuaggaauaauaaugugauuggucugcucugucacauuaucuuccccaaggucaacugaucgacucugaucaccuuuggcaggaucuucaucuuccuuuccuccugcugugacuguuucuucauccugcucaucuagauccgcuacaguuccuccuuuaacagguguauuuucacuaucuuucuuuagguucacauuuuugggaaguacuacuucuucuauauuggguacagguguugggucuuccauauccuugguuagaucuucuugcucaucuuccucuuucugacuucugcgcuucccauaaaggcuagcuuggccuuucuucccacucuucuuccgugauucuguuggugucggagggggaggcgaaggcgaauguuuccucuuucgagcauuagcugaugcuuuucuaucucuucuuucuggacuucugacuggcucuucauucuugguugaaauccgcugacgaaaacucacaggcuuccuauuuucauccaccucauaauccuccucauucauccauucauugaaaauaucaguguccaaaauccauuucacaugaaccuuccaugguuuuucuggaauugguggaucuucaauuucagcaucaacaucauuacuauggacccaaguaucauagcugucuggguaaaagccccaaugcacuaacacuugcuucucuuuucucaucaccggucucaaccauucuucaucgucuugugaggaagaauauggguaaauguggugggaagcuuuugacuucucauccguaaauguucccugaugucguuugaugauaucuuucaauuuguuagccaacuucagaucaaugucuggaaugagguagauguugggucuggucaaacaauuguucugcaccaauguuuuuucaauguucauaaacauuuccacauuacgauccauucgagauggguucuguaggucaaaccuccgccaucccuguucauuuuuauacuuguaagcagccccaagaaugugacauaaggcgccuccagcuuugaaauccaugaaacacuuugcagggaguuuggugaaggccggguuggugacaugcuucccaaaggcaucuuccuggaacugaagaagcugcaccaccagcccagccaguguuuuauugguaggagcauccgcaugaacauacuucuuguagugcuugcccagccagacccgcaccgaauccagcugggacaccgucuccgggcucucccaaaacuugguggccgggcccccauccuuccgucgauaaacagcuaggccugcggcugccgccgcaauccccgagcccguggcgccuaccgcuguccccggcccgccgccgcccgccgcugcggccaucgucgcagcccgucguccccacagccuggcccaccccggcccucgcgguguuucccggucguucccgcgcgcacccccgcgcgcguagccgccacugccgcuucccggccccgcccag

SEQ ID NO: 2092 - RNA, 5619 nt, Homo sapiens
cugcgugaugggacaucaggcagcuuuauuuauuuacucuuaaaacuguuacaacagaaucauggacugacacagguaauggcugagccauaagcaaaucgagaaguacagaaaugucccaccccaaacagcugcggaguacacaucacacagggccucuggucccggccuucucaggugcucuggaguggaggauccuuugagggaacucugaccacuccuguugucuaccuagagagcacgccacuugggccaccuacccccaaccuuuggccaaaggagugaaaggaccuggaaccugucgucaaccucagcauccucaugaccccaggacagacgcaguggaggcagcagguacucugggccugugcuguugccccugaggugucuccugacuacgcaacccuguuuccuucccacuuucaucccagcaggcccuuucuuccugcugacaaaacacuggcucccucauguucuuggcacagcagaaguguucugcacauggucucuacggaggaaagcuggucccccuggcccaggcagcacuuccuccgugagccccugcaguuuccuggugugugcuuggggagcuagggacauggugucaaaccuccacaaggcacugcuaccucagaaagggggaggaccugucaggcccaggacagccucccugcacauggagaucaaaucuaaacuuaggucaagaccccuaccuucuccagggaugccaggaccagagaagggcagaggucaggagggggcaugaggaggccaagucuggggcagccuccucagaggcaaaucuacacugcagccaaucccccuccagagaagcccuuggaaucucccaggccauuucacuacaaacuuauguuugaauccuuuauuagaaaccaugcaaacuuuaauacaaaaaauacaagugcaauaagaaucuuugugucaauacaguucccgggauuucuccucacugcagccaucccaaggccuagcugggaugcccucugugggccuugccucuccucccuccccucuccagucagggcauaagggaagcagauagccuuagucucaugccuuuuauuuuuaaauuuccagaccugauuuccuacuaucugcaugaggcucccuuggacaugagggcuuacauguccuagggugugggugccggccugaaggaauuccaucuccuggcccuuucuuguucuccagcccuggcuuuuuauccuagggcugaccaccagaucccagggaaugggacagagaugccaaaaccagccucuugguuagaaaagaaaagcagcauacacacaacaaaauggcaaaaccaaccaguccacgcuccaagggccccuugugugccugaccggcucaccagccacagccucugcaccccucuucccugccgcaccgccuccagggcccuaagcugcccacauccuccagcggggguggcauaaggauaucuccgcccuguucccucuaacacuuacugaggacuuucauguagacauggcuucaaccugcagaacuauuuugccaguuuuuagguuauuagaaaaaaauaaaaggacaaaacaagaaaaaugugacagcagcuaggcggguauguuaagcauggggacaggcagcacugacccccaacuuggggcagggcagcaagaagggcccgacaccaccugcauggggaggggggggcgcccauuugugggaccagagggagaggcaguggcuuaagcuccacggucagcguccugucaccacucggaauccaccuccacucuucccuccagguagauccagggagaagggagggcaugucaguuucuuuuggguuuggaccaaagaaccaaaaaaagaugaggauagaaucugguucuccucuccuagaucccaacuuagccucaaccaccccaacccccucccaaccuccuccacggagcaguggcgcagugauggggcaagaccaaagcagggagaugggcccaggcuggggagugagaggagguguggggcagggcugcugcugccccgggcacgcaaagcaggagggaaggcgagccuagcgggcugcccagcacggcgcccaagcgcucacuggucuaguggacagcccgggaaagggggccaaggacccgggagcccgaguuggggccgccagggaaguguggggggcgggagacaaugucggccccguggucggugcgggcccuggcauuugcccggaacgucagccuguaggucucaaucuucacagcaccuccugcagguagguggcccacauuaucgagggaucccaccuuggccugggccuucuccuugaaguucaacuucugacuuucaaucuugacaucuccuccaccaggcuugugcuugauguuagccuuagacccacacuuggaggagaccuuagagauguccacuuucuuguucugaaucugaacauuaccaccuccagggacaugcuuaauauuguccuuggaaccacacuuggacugaauauggcuguagcucacuuuuuuggagacuaucuggacccggccuccuccaggcugaugcuugauguuuuccguggagccaaccuuggagcggacauucuucagaucaggagcagaaguauugguggccaggcggcugagccggggggugguggagcuggguuuggccgaggugggcuucuugucuaugaaaggaguuguggagggccgggagggcauggguguggccuugacucggcugggaaccaccccugcagcgggggcugucccacugagaguggugguuuucuucauggaacugguggaggugcucuuugggcgacucaagucagcugguacagacuuugcagucaucuucuugacuucugcagguuuucccucagucuuaauggcagugggcuucuugggcaggagcguggaggggcuccuacugcuugggccaguugaggcaacagcagcagcuguugugguuuuugcaacagucugagugcucuuggacccagaucuggaggcuggggcagaagcuggcuuggauggugaggcccgcuucucaggagccuuugcaucugcaaugggcuuuguuuucuucucugggcuuggugggagcuccuuguucggugggguggugaugucauuuccugucccacucaccacaggccuuccuucuucuggccuggcuauuccaagcuucucuggcucaucgggcccugugccugcaaugcagcugcucuccagaccguaggugggauccacuuucccagaggcucgugcugcuucuuguacuuucuugacaugagcuucaaccaauuccagugguaccuccucccggacccgagaaaacuccuccaaagccgcuuuugcugcagcagaugccacgcgaggguccaccacagaugccaaaaaagcaacaguacucauaacuggauuuccugacugacugaaggggacaggcugguaggccaaaggcccaagggaagcaucugaauucucaagguauggguccucaaugggaagucucaaaaaguggaggaugcauucauccugaguacgacuuccaacauguuccgacacuuuguuccaaucauccuuguacaucuccagggccuccaggaguagaagggucuccuguucaguccauucucuuccagcacuagcaccuuuacucuuugcuaauguuuucuuggaguaaaugucaguacggagaccaaaguucugcaaaucaacugguuuuuccuuguuuuucucaggaaaauuuagcaucuguugagcagcaggaaccugaggugaucgaagaugcagaggcacaagcccagaggggguaucagcuaauacauuaaaaugaggaguaggaggaggucccauugccaugggucuacuuuccgggucaacuugguaauuaacgaguccccacugcucuaaaaaggcauggacccucaucacagcacacacaucuccagucaaguuccuccgacaagcagugcuaguuaaauacucuuggggguuuagacgauacgugucaaucauaaaauuucgauaugccaaguauauuucuggagucuuggauuuguuuuuuccauugaagaacucaggaagagcacgccguucaaucacaugaauacaguuauaaucaaaccaugaugcauaacuaggaauaauaaugugauuggucugcucugucacauuaucuuccccaaggucaacugaucgacucugaucaccuuuggcaggaucuucaucuuccuuuccuccugcugugacuguuucuucauccugcucaucuagauccgcuacaguuccuccuuuaacagguguauuuucacuaucuuucuuuagguucacauuuuugggaaguacuacuucuucuauauuggguacagguguugggucuuccauauccuugguuagaucuucuugcucaucuuccucuuucugacuucugcgcuucccauaaaggcuagcuuggccuuucuucccacucuucuuccgugauucuguuggugucggagggggaggcgaaggcgaauguuuccucuuucgagcauuagcugaugcuuuucuaucucuucuuucuggacuucugacuggcucuucauucuugguugaaauccgcugacgaaaacucacaggcuuccuauuuucauccaccucauaauccuccucauucauccauucauugaaaauaucaguguccaaaauccauuucacaugaaccuuccaugguuuuucuggaauugguggaucuucaauuucagcaucaacaucauuacuauggacccaaguaucauagcugucuggguaaaagccccaaugcacuaacacuugcuucucuuuucucaucaccggucucaaccauucuucaucgucuugugaggaagaauauggguaaauguggugggaagcuuuugacuucucauccguaaauguucccugaugucguuugaugauaucuuucaauuuguuagccaacuucagaucaaugucuggaaugagguagauguugggucuggucaaacaauuguucugcaccaauguuuuuucaauguucauaaacauuuccacauuacgauccauucgagauggguucuguaggucaaaccuccgccaucccuguucauuuuuauacuuguaagcagccccaagaaugugacauaaggcgccuccagcuuugaaauccaugaaacacuuugcagggaguuuggugaaggccggguuggugacaugcuucccaaaggcaucuuccuggaacugaagaagcugcaccaccagcccagccaguguuuuauugguaggagcauccgcaugaacauacuucuuguagugcuugcccagccagacccgcaccgaauccagcugggacaccgucuccgggcucucccaaaacuugguggccgggcccccauccuuccgucgauaaacagcuaggccugcggcugccgccgcaauccccgagcccguggcgccuaccgcuguccccggcccgccgccgcccgccgcugcggccaucgucgcagcccgucguccccacagccuggcccaccccggcccucgcgguguuucccggucguucccgcgcgcacccccgcgcgcguagccgccacugccgcuucccggccccgcccag

SEQ ID NO: 2093 - RNA, 7305 nt, Homo sapiens
cugcgugaugggacaucaggcagcuuuauuuauuuacucuuaaaacuguuacaacagaaucauggacugacacagguaauggcugagccauaagcaaaucgagaaguacagaaaugucccaccccaaacagcugcggaguacacaucacacagggccucuggucccggccuucucaggugcucuggaguggaggauccuuugagggaacucugaccacuccuguugucuaccuagagagcacgccacuugggccaccuacccccaaccuuuggccaaaggagugaaaggaccuggaaccugucgucaaccucagcauccucaugaccccaggacagacgcaguggaggcagcagguacucugggccugugcuguugccccugaggugucuccugacuacgcaacccuguuuccuucccacuuucaucccagcaggcccuuucuuccugcugacaaaacacuggcucccucauguucuuggcacagcagaaguguucugcacauggucucuacggaggaaagcuggucccccuggcccaggcagcacuuccuccgugagccccugcaguuuccuggugugugcuuggggagcuagggacauggugucaaaccuccacaaggcacugcuaccucagaaagggggaggaccugucaggcccaggacagccucccugcacauggagaucaaaucuaaacuuaggucaagaccccuaccuucuccagggaugccaggaccagagaagggcagaggucaggagggggcaugaggaggccaagucuggggcagccuccucagaggcaaaucuacacugcagccaaucccccuccagagaagcccuuggaaucucccaggccauuucacuacaaacuuauguuugaauccuuuauuagaaaccaugcaaacuuuaauacaaaaaauacaagugcaauaagaaucuuugugucaauacaguucccgggauuucuccucacugcagccaucccaaggccuagcugggaugcccucugugggccuugccucuccucccuccccucuccagucagggcauaagggaagcagauagccuuagucucaugccuuuuauuuuuaaauuuccagaccugauuuccuacuaucugcaugaggcucccuuggacaugagggcuuacauguccuagggugugggugccggccugaaggaauuccaucuccuggcccuuucuuguucuccagcccuggcuuuuuauccuagggcugaccaccagaucccagggaaugggacagagaugccaaaaccagccucuugguuagaaaagaaaagcagcauacacacaacaaaauggcaaaaccaaccaguccacgcuccaagggccccuugugugccugaccggcucaccagccacagccucugcaccccucuucccugccgcaccgccuccagggcccuaagcugcccacauccuccagcggggguggcauaaggauaucuccgcccuguucccucuaacacuuacugaggacuuucauguagacauggcuucaaccugcagaacuauuuugccaguuuuuagguuauuagaaaaaaauaaaaggacaaaacaagaaaaaugugacagcagcuaggcggguauguuaagcauggggacaggcagcacugacccccaacuuggggcagggcagcaagaagggcccgacaccaccugcauggggaggggggggcgcccauuugugggaccagagggagaggcaguggcuuaagcuccacggucagcguccugucaccacucggaauccaccuccacucuucccuccagguagauccagggagaagggagggcaugucaguuucuuuuggguuuggaccaaagaaccaaaaaaagaugaggauagaaucugguucuccucuccuagaucccaacuuagccucaaccaccccaacccccucccaaccuccuccacggagcaguggcgcagugauggggcaagaccaaagcagggagaugggcccaggcuggggagugagaggagguguggggcagggcugcugcugccccgggcacgcaaagcaggagggaaggcgagccuagcgggcugcccagcacggcgcccaagcgcucacuggucuaguggacagcccgggaaagggggccaaggacccgggagcccgaguuggggccgccagggaaguguggggggcgggagacaaugucggccccguggucggugcgggcccuggcauuugcccggaacgucagccuguaggucucaaucuucacagcaccuccugcagguagguggcccacauuaucgagggaucccaccuuggccugggccuucuccuugaaguucaacuucugacuuucaaucuugacaucuccuccaccaggcuugugcuugauguuagccuuagacccacacuuggaggagaccuuagagauguccacuuucuuguucugaaucugaacauuaccaccuccagggacaugcuuaauauuguccuuggaaccacacuuggacugaauauggcuguagcucacuuuuuuggagacuaucuggacuuuccccgcagguuguuucugugcacuugcaauugggccggcuguuuuagugacugcauuagauucaggcuuucggguuguagcagcugccucuguuuuuuucucuacuuuggcccggccuccuccaggcugaugcuugauguuuuccguggagccaaccuuggagcggacauucuucagaucaggagcagaaguauugguggccaggcggcugagccggggggugguggagcuggguuuggccgaggugggcuucuugucuaugaaaggaguuguggagggccgggagggcauggguguggccuugacucggcugggaaccaccccugcagcgggggcugucccacugagaguggugguuuucuucauggaacugguggaggugcucuuugggcgacucaagucagcugguacagacuuugcagucaucuucuugacuucugcagguuuucccucagucuuaauggcagugggcuucuugggcaggagcguggaggggcuccuacugcuugggccaguugaggcaacagcagcagcuguugugguuuuugcaacagucugagugcucuuggacccagaucuggaggcuggggcagaagcuggcuuggauggugaggcccgcuucucaggagccuuugcaucugcaaugggcuuuggcuucacgucuuuugaagguaagauggaaggccuggcagaggcgacggcagggcguuuggguggggcagcuggcacuaagccugaagcaaggcucauggguuuuuuauucaacccaccaaugguggugggagcuggcugcuuagggagagaagugggcuguguuuuggcuuucgauguugaagucuuugcagguugagugguggccaaaggcuuuguuuucuucucugggcuuggugggagcuccuuguucggugggguggugaugucauuuccugucccacucaccacaggccuuccuucuucuggccuggcuauuccugaggucucugaagaaagcucagaagguugacuguugcaugguuuccuuuccccuaguuuuucuaacacagaauccuccucggccggcaagcugcacuuuuuccccguuccugugacgguuucuggugaaaucaugaaaguaggugcagcugacugccccacauccugcagagauucuaaaugggaauccucacuuauuccuuuuuguguuugugcaauuuccaugucuuuaauuggaacugguguugccucuguuucugagagugguggaacaucuuuggcuggagucacauuguuggccagggucagaaccccauccuuagccaggggugcuucuguuuugagggcugggaccugauccucagucagggccaccuccauuucuggaggcagacauacguucuugaugagaacuacuucuguuucuggagguggagucacauccuugcccagagccauuucuguuucugauaguggagacauguccuucaacaagcccacuucuuuuacuguggacggagccacauccuuggccggggcuauuucuguuucugggaguugagccauguccuugacuggggccaccucugcuucuaaagguagugcuuuauccuuggucaagaucacguugguuuccgggggcagugucaugucccuggccagggcuaccucuguuucugaggacaaagccaccuucucagcagaggauauuucuguggaugauauaaugucauuagccugugccaccucuauuucugagaguaauaccaaauccuuggcugggacuaucuuguuuucuuuggguggucccauguccuuggaaggagccaaguccauuuuuauaggagaugcccucucuguuucuuucuuguuuucuuuggguggucccauguccuuggaaggggcuaaguccauuuuuauaggagaugcccucucuguuucuuucaacagugucacauccuuggcuggggcuaccucuguuucugugggcaguaccacauucuuggcugaagauacaucuguuucugugggccaucugacauccuuaaccagggccacuucuuuuucuguggguaguuccauguccuugacuagggccauaucugauuccauggauggcugcauguccuuggccagugucacaucuaauuuggugggugauuccauaucuuuagccaaugccaccucgguuuuuguagcuagugccauguccuuggcgagggccaucucuguuucuuuagauggugccaugucaguagucuucagucccaucauuauuuccaaugcuugugcugguggccucucuucugaugccauuucuaucuccuuggcuagcucuaagggaacugccguuggcugaggagguucugcaacagccucuggggaaacaaaggacucugaguguggagaguuuaaggcuuccacagaccaccccugagguacaacagcuguguugcagggagacauaccguaacugucuuucaagggaucauuuuguccugcaaauauugaaguaucagcugucgcacuggagggaaagaccaaaucugccaggucaucaucaugguacaucuuaaagggaucaagcuucucuggcucaucgggcccugugccugcaaugcagcugcucuccagaccguaggugggauccacuuucccagaggcucgugcugcuucuuguacuuucuugacaugagcuucaaccaauuccagugguaccuccucccggacccgagaaaacuccuccaaagccgcuuuugcugcagcagaugccacgcgaggguccaccacagaugccaaaaaagcaacaguacucauaacuggauuuccugacugacugaaggggacaggcugguaggccaaaggcccaagggaagcaucugaauucucaagguauggguccucaaugggaagucucaaaaaguggaggaugcauucauccugaguacgacuuccaacauguuccgacacuuuguuccaaucauccuuguacaucuccagggccuccaggaguagaagggucuccuguucaguccauucucuuccagcacuagcaccuuuacucuuugcuaauguuuucuuggaguaaaugucaguacggagaccaaaguucugcaaaucaacugguuuuuccuuguuuuucucaggaaaauuuagcaucuguugagcagcaggaaccugaggugaucgaagaugcagaggcacaagcccagaggggguaucagcuaauacauuaaaaugaggaguaggaggaggucccauugccaugggucuacuuuccgggucaacuugguaauuaacgaguccccacugcucuaaaaaggcauggacccucaucacagcacacacaucuccagucaaguuccuccgacaagcagugcuaguuaaauacucuuggggguuuagacgauacgugucaaucauaaaauuucgauaugccaaguauauuucuggagucuuggauuuguuuuuuccauugaagaacucaggaagagcacgccguucaaucacaugaauacaguuauaaucaaaccaugaugcauaacuaggaauaauaaugugauuggucugcucugucacauuaucuuccccaaggucaacugaucgacucugaucaccuuuggcaggaucuucaucuuccuuuccuccugcugugacuguuucuucauccugcucaucuagauccgcuacaguuccuccuuuaacagguguauuuucacuaucuuucuuuagguucacauuuuugggaaguacuacuucuucuauauuggguacagguguugggucuuccauauccuugguuagaucuucuugcucaucuuccucuuucugacuucugcgcuucccauaaaggcuagcuuggccuuucuucccacucuucuuccgugauucuguuggugucggagggggaggcgaaggcgaauguuuccucuuucgagcauuagcugaugcuuuucuaucucuucuuucuggacuucugacuggcucuucauucuugguugaaauccgcugacgaaaacucacaggcuuccuauuuucauccaccucauaauccuccucauucauccauucauugaaaauaucaguguccaaaauccauuucacaugaaccuuccaugguuuuucuggaauugguggaucuucaauuucagcaucaacaucauuacuauggacccaaguaucauagcugucuggguaaaagccccaaugcacuaacacuugcuucucuuuucucaucaccggucucaaccauucuucaucgucuugugaggaagaauauggguaaauguggugggaagcuuuugacuucucauccguaaauguucccugaugucguuugaugauaucuuucaauuuguuagccaacuucagaucaaugucuggaaugagguagauguugggucuggucaaacaauuguucugcaccaauguuuuuucaauguucauaaacauuuccacauuacgauccauucgagauggguucuguaggucaaaccuccgccaucccuguucauuuuuauacuuguaagcagccccaagaaugugacauaaggcgccuccagcuuugaaauccaugaaacacuuugcagggaguuuggugaaggccggguuggugacaugcuucccaaaggcaucuuccuggaacugaagaagcugcaccaccagcccagccaguguuuuauugguaggagcauccgcaugaacauacuuggaauagcacguccugcggccucagccgccucuuccgccauccuccguaggcugcauucugcccuagugagcgccgguuuuu

SEQ ID NO: 2094 - RNA, 4117 nt, Homo sapiens
cuuuggcuucacgucuuuugaagguaagauggaaggccuggcagaggcgacggcagggcguuuggguggggcagcuggcacuaagccugaagcaaggcucauggguuuuuuauucaacccaccaaugguggugggagcuggcugcuuagggagagaagugggcuguguuuuggcuuucgauguugaagucuuugcagguugagugguggccaaaggcuuuguuuucuucucugggcuuggugggagcuccuuguucggugggguggugaugucauuuccugucccacucaccacaggccuuccuucuucuggccuggcuauuccugaggucucugaagaaagcucagaagguugacuguugcaugguuuccuuuccccuaguuuuucuaacacagaauccuccucggccggcaagcugcacuuuuuccccguuccugugacgguuucuggugaaaucaugaaaguaggugcagcugacugccccacauccugcagagauucuaaaugggaauccucacuuauuccuuuuuguguuugugcaauuuccaugucuuuaauuggaacugguguugccucuguuucugagagugguggaacaucuuuggcuggagucacauuguuggccagggucagaaccccauccuuagccaggggugcuucuguuuugagggcugggaccugauccucagucagggccaccuccauuucuggaggcagacauacguucuugaugagaacuacuucuguuucuggagguggagucacauccuugcccagagccauuucuguuucugauaguggagacauguccuucaacaagcccacuucuuuuacuguggacggagccacauccuuggccggggcuauuucuguuucugggaguugagccauguccuugacuggggccaccucugcuucuaaagguagugcuuuauccuuggucaagaucacguugguuuccgggggcagugucaugucccuggccagggcuaccucuguuucugaggacaaagccaccuucucagcagaggauauuucuguggaugauauaaugucauuagccugugccaccucuauuucugagaguaauaccaaauccuuggcugggacuaucuuguuuucuuuggguggucccauguccuuggaaggagccaaguccauuuuuauaggagaugcccucucuguuucuuucuuguuuucuuuggguggucccauguccuuggaaggggcuaaguccauuuuuauaggagaugcccucucuguuucuuucaacagugucacauccuuggcuggggcuaccucuguuucugugggcaguaccacauucuuggcugaagauacaucuguuucugugggccaucugacauccuuaaccagggccacuucuuuuucuguggguaguuccauguccuugacuagggccauaucugauuccauggauggcugcauguccuuggccagugucacaucuaauuuggugggugauuccauaucuuuagccaaugccaccucgguuuuuguagcuagugccauguccuuggcgagggccaucucuguuucuuuagauggugccaugucaguagucuucagucccaucauuauuuccaaugcuugugcugguggccucucuucugaugccauuucuaucuccuuggcuagcucuaagggaacugccguuggcugaggagguucugcaacagccucuggggaaacaaaggacucugaguguggagaguuuaaggcuuccacagaccaccccugagguacaacagcuguguugcagggagacauaccguaacugucuuucaagggaucauuuuguccugcaaauauugaaguaucagcugucgcacuggagggaaagaccaaaucugccaggucaucaucaugguacaucuuaaagggaucaagcuucucuggcucaucgggcccugugccugcaaugcagcugcucuccagaccguaggugggauccacuuucccagaggcucgugcugcuucuuguacuuucuugacaugagcuucaaccaauuccagugguaccuccucccggacccgagaaaacuccuccaaagccgcuuuugcugcagcagaugccacgcgaggguccaccacagaugccaaaaaagcaacaguacucauaacuggauuuccugacugacugaaggggacaggcugguaggccaaaggcccaagggaagcaucugaauucucaagguauggguccucaaugggaagucucaaaaaguggaggaugcauucauccugaguacgacuuccaacauguuccgacacuuuguuccaaucauccuuguacaucuccagggccuccaggaguagaagggucuccuguucaguccauucucuuccagcacuagcaccuuuacucuuugcuaauguuuucuuggaguaaaugucaguacggagaccaaaguucugcaaaucaacugguuuuuccuuguuuuucucaggaaaauuuagcaucuguugagcagcaggaaccugaggugaucgaagaugcagaggcacaagcccagaggggguaucagcuaauacauuaaaaugaggaguaggaggaggucccauugccaugggucuacuuuccgggucaacuugguaauuaacgaguccccacugcucuaaaaaggcauggacccucaucacagcacacacaucuccagucaaguuccuccgacaagcagugcuaguuaaauacucuuggggguuuagacgauacgugucaaucauaaaauuucgauaugccaaguauauuucuggagucuuggauuuguuuuuuccauugaagaacucaggaagagcacgccguucaaucacaugaauacaguuauaaucaaaccaugaugcauaacuaggaauaauaaugugauuggucugcucugucacauuaucuuccccaaggucaacugaucgacucugaucaccuuuggcaggaucuucaucuuccuuuccuccugcugugacuguuucuucauccugcucaucuagauccgcuacaguuccuccuuuaacagguguauuuucacuaucuuucuuuagguucacauuuuugggaaguacuacuucuucuauauuggguacagguguugggucuuccauauccuugguuagaucuucuugcucaucuuccucuuucugacuucugcgcuucccauaaaggcuagcuuggccuuucuucccacucuucuuccgugauucuguuggugucggagggggaggcgaaggcgaauguuuccucuuucgagcauuagcugaugcuuuucuaucucuucuuucuggacuucugacuggcucuucauucuugguugaaauccgcugacgaaaacucacaggcuuccuauuuucauccaccucauaauccuccucauucauccauucauugaaaauaucaguguccaaaauccauuucacaugaaccuuccaugguuuuucuggaauugguggaucuucaauuucagcaucaacaucauuacuauggacccaaguaucauagcugucuggguaaaagccccaaugcacuaacacuugcuucucuuuucucaucaccggucucaaccauucuucaucgucuugugaggaagaauauggguaaauguggugggaagcuuuugacuucucauccguaaauguucccugaugucguuugaugauaucuuucaauuuguuagccaacuucagaucaaugucuggaaugagguagauguugggucuggucaaacaauuguucugcaccaauguuuuuucaauguucauaaacauuuccacauuacgauccauucgagauggguucuguaggucaaaccuccgccaucccuguucauuuuuauacuuguaagcagccccaagaaugugacauaaggcgccuccagcuuugaaauccaugaaacacuuugcagggaguuuggugaaggccggguuggugacaugcuucccaaaggcaucuuccuggaacugaagaagcugcaccaccagcccagccaguguuuuauugguaggagcauccgcaugaacauacuuggaauagcacguccugcggccucagccgccucuuccgccauccuccguaggcugcauucugcccuagugagcgccgguuuuu

SEQ ID NO: 2095 - RNA, 2761 nt, Homo sapiens
cuuuggcuucacgucuuuugaagguaagauggaaggccuggcagaggcgacggcagggcguuuggguggggcagcuggcacuaagccugaagcaaggcucauggguuuuuuauucaacccaccaaugguggugggagcuggcugcuuagggagagaagugggcuguguuuuggcuuucgauguugaagucuuugcagguugagugguggccaaaggcuuuguuuucuucucugggcuuggugggagcuccuuguucggugggguggugaugucauuuccugucccacucaccacaggccuuccuucuucuggccuggcuauuccaagcuucucuggcucaucgggcccugugccugcaaugcagcugcucuccagaccguaggugggauccacuuucccagaggcucgugcugcuucuuguacuuucuugacaugagcuucaaccaauuccagugguaccuccucccggacccgagaaaacuccuccaaagccgcuuuugcugcagcagaugccacgcgaggguccaccacagaugccaaaaaagcaacaguacucauaacuggauuuccugacugacugaaggggacaggcugguaggccaaaggcccaagggaagcaucugaauucucaagguauggguccucaaugggaagucucaaaaaguggaggaugcauucauccugaguacgacuuccaacauguuccgacacuuuguuccaaucauccuuguacaucuccagggccuccaggaguagaagggucuccuguucaguccauucucuuccagcacuagcaccuuuacucuuugcuaauguuuucuuggaguaaaugucaguacggagaccaaaguucugcaaaucaacugguuuuuccuuguuuuucucaggaaaauuuagcaucuguugagcagcaggaaccugaggugaucgaagaugcagaggcacaagcccagaggggguaucagcuaauacauuaaaaugaggaguaggaggaggucccauugccaugggucuacuuuccgggucaacuugguaauuaacgaguccccacugcucuaaaaaggcauggacccucaucacagcacacacaucuccagucaaguuccuccgacaagcagugcuaguuaaauacucuuggggguuuagacgauacgugucaaucauaaaauuucgauaugccaaguauauuucuggagucuuggauuuguuuuuuccauugaagaacucaggaagagcacgccguucaaucacaugaauacaguuauaaucaaaccaugaugcauaacuaggaauaauaaugugauuggucugcucugucacauuaucuuccccaaggucaacugaucgacucugaucaccuuuggcaggaucuucaucuuccuuuccuccugcugugacuguuucuucauccugcucaucuagauccgcuacaguuccuccuuuaacagguguauuuucacuaucuuucuuuagguucacauuuuugggaaguacuacuucuucuauauuggguacagguguugggucuuccauauccuugguuagaucuucuugcucaucuuccucuuucugacuucugcgcuucccauaaaggcuagcuuggccuuucuucccacucuucuuccgugauucuguuggugucggagggggaggcgaaggcgaauguuuccucuuucgagcauuagcugaugcuuuucuaucucuucuuucuggacuucugacuggcucuucauucuugguugaaauccgcugacgaaaacucacaggcuuccuauuuucauccaccucauaauccuccucauucauccauucauugaaaauaucaguguccaaaauccauuucacaugaaccuuccaugguuuuucuggaauugguggaucuucaauuucagcaucaacaucauuacuauggacccaaguaucauagcugucuggguaaaagccccaaugcacuaacacuugcuucucuuuucucaucaccggucucaaccauucuucaucgucuugugaggaagaauauggguaaauguggugggaagcuuuugacuucucauccguaaauguucccugaugucguuugaugauaucuuucaauuuguuagccaacuucagaucaaugucuggaaugagguagauguugggucuggucaaacaauuguucugcaccaauguuuuuucaauguucauaaacauuuccacauuacgauccauucgagauggguucuguaggucaaaccuccgccaucccuguucauuuuuauacuuguaagcagccccaagaaugugacauaaggcgccuccagcuuugaaauccaugaaacacuuugcagggaguuuggugaaggccggguuggugacaugcuucccaaaggcaucuuccuggaacugaagaagcugcaccaccagcccagccaguguuuuauugguaggagcauccgcaugaacauacuucuuguagugcuugcccagccagacccgcaccgaauccagcugggacaccgucuccgggcucucccaaaacuugguggccgggcccccauccuuccgucgauaaacagcuaggccugcggcugccgccgcaauccccgagcccguggcgccuaccgcuguccccggcccgccgccgcccgccgcugcggccaucgucgcagcccgucguccccacagccuggcccaccccggcccucgcgguguuucccggucguucccgcgcgcacccccgcgcgcguagccgccacugccgcuucccggccccgcccag

SEQ ID NO: 2096 - RNA, 4240 nt, Homo sapiens
cuuuggcuucacgucuuuugaagguaagauggaaggccuggcagaggcgacggcagggcguuuggguggggcagcuggcacuaagccugaagcaaggcucauggguuuuuuauucaacccaccaaugguggugggagcuggcugcuuagggagagaagugggcuguguuuuggcuuucgauguugaagucuuugcagguugagugguggccaaaggcuuuguuuucuucucugggcuuggugggagcuccuuguucggugggguggugaugucauuuccugucccacucaccacaggccuuccuucuucuggccuggcuauuccugaggucucugaagaaagcucagaagguugacuguugcaugguuuccuuuccccuaguuuuucuaacacagaauccuccucggccggcaagcugcacuuuuuccccguuccugugacgguuucuggugaaaucaugaaaguaggugcagcugacugccccacauccugcagagauucuaaaugggaauccucacuuauuccuuuuuguguuugugcaauuuccaugucuuuaauuggaacugguguugccucuguuucugagagugguggaacaucuuuggcuggagucacauuguuggccagggucagaaccccauccuuagccaggggugcuucuguuuugagggcugggaccugauccucagucagggccaccuccauuucuggaggcagacauacguucuugaugagaacuacuucuguuucuggagguggagucacauccuugcccagagccauuucuguuucugauaguggagacauguccuucaacaagcccacuucuuuuacuguggacggagccacauccuuggccggggcuauuucuguuucugggaguugagccauguccuugacuggggccaccucugcuucuaaagguagugcuuuauccuuggucaagaucacguugguuuccgggggcagugucaugucccuggccagggcuaccucuguuucugaggacaaagccaccuucucagcagaggauauuucuguggaugauauaaugucauuagccugugccaccucuauuucugagaguaauaccaaauccuuggcugggacuaucuuguuuucuuuggguggucccauguccuuggaaggagccaaguccauuuuuauaggagaugcccucucuguuucuuucuuguuuucuuuggguggucccauguccuuggaaggggcuaaguccauuuuuauaggagaugcccucucuguuucuuucaacagugucacauccuuggcuggggcuaccucuguuucugugggcaguaccacauucuuggcugaagauacaucuguuucugugggccaucugacauccuuaaccagggccacuucuuuuucuguggguaguuccauguccuugacuagggccauaucugauuccauggauggcugcauguccuuggccagugucacaucuaauuuggugggugauuccauaucuuuagccaaugccaccucgguuuuuguagcuagugccauguccuuggcgagggccaucucuguuucuuuagauggugccaugucaguagucuucagucccaucauuauuuccaaugcuugugcugguggccucucuucugaugccauuucuaucuccuuggcuagcucuaagggaacugccguuggcugaggagguucugcaacagccucuggggaaacaaaggacucugaguguggagaguuuaaggcuuccacagaccaccccugagguacaacagcuguguugcagggagacauaccguaacugucuuucaagggaucauuuuguccugcaaauauugaaguaucagcugucgcacuggagggaaagaccaaaucugccaggucaucaucaugguacaucuuaaagggaucagucuggauaggaucgaccacuugcucagguuggaaacaaaaguugguaucuucuggccaguucuggcuauuuggguauuccugguaggccauuuucucuucaaggaauucaguuggagacccaagcuucucuggcucaucgggcccugugccugcaaugcagcugcucuccagaccguaggugggauccacuuucccagaggcucgugcugcuucuuguacuuucuugacaugagcuucaaccaauuccagugguaccuccucccggacccgagaaaacuccuccaaagccgcuuuugcugcagcagaugccacgcgaggguccaccacagaugccaaaaaagcaacaguacucauaacuggauuuccugacugacugaaggggacaggcugguaggccaaaggcccaagggaagcaucugaauucucaagguauggguccucaaugggaagucucaaaaaguggaggaugcauucauccugaguacgacuuccaacauguuccgacacuuuguuccaaucauccuuguacaucuccagggccuccaggaguagaagggucuccuguucaguccauucucuuccagcacuagcaccuuuacucuuugcuaauguuuucuuggaguaaaugucaguacggagaccaaaguucugcaaaucaacugguuuuuccuuguuuuucucaggaaaauuuagcaucuguugagcagcaggaaccugaggugaucgaagaugcagaggcacaagcccagaggggguaucagcuaauacauuaaaaugaggaguaggaggaggucccauugccaugggucuacuuuccgggucaacuugguaauuaacgaguccccacugcucuaaaaaggcauggacccucaucacagcacacacaucuccagucaaguuccuccgacaagcagugcuaguuaaauacucuuggggguuuagacgauacgugucaaucauaaaauuucgauaugccaaguauauuucuggagucuuggauuuguuuuuuccauugaagaacucaggaagagcacgccguucaaucacaugaauacaguuauaaucaaaccaugaugcauaacuaggaauaauaaugugauuggucugcucugucacauuaucuuccccaaggucaacugaucgacucugaucaccuuuggcaggaucuucaucuuccuuuccuccugcugugacuguuucuucauccugcucaucuagauccgcuacaguuccuccuuuaacagguguauuuucacuaucuuucuuuagguucacauuuuugggaaguacuacuucuucuauauuggguacagguguugggucuuccauauccuugguuagaucuucuugcucaucuuccucuuucugacuucugcgcuucccauaaaggcuagcuuggccuuucuucccacucuucuuccgugauucuguuggugucggagggggaggcgaaggcgaauguuuccucuuucgagcauuagcugaugcuuuucuaucucuucuuucuggacuucugacuggcucuucauucuugguugaaauccgcugacgaaaacucacaggcuuccuauuuucauccaccucauaauccuccucauucauccauucauugaaaauaucaguguccaaaauccauuucacaugaaccuuccaugguuuuucuggaauugguggaucuucaauuucagcaucaacaucauuacuauggacccaaguaucauagcugucuggguaaaagccccaaugcacuaacacuugcuucucuuuucucaucaccggucucaaccauucuucaucgucuugugaggaagaauauggguaaauguggugggaagcuuuugacuucucauccguaaauguucccugaugucguuugaugauaucuuucaauuuguuagccaacuucagaucaaugucuggaaugagguagauguugggucuggucaaacaauuguucugcaccaauguuuuuucaauguucauaaacauuuccacauuacgauccauucgagauggguucuguaggucaaaccuccgccaucccuguucauuuuuauacuuguaagcagccccaagaaugugacauaaggcgccuccagcuuugaaauccaugaaacacuuugcagggaguuuggugaaggccggguuggugacaugcuucccaaaggcaucuuccuggaacugaagaagcugcaccaccagcccagccaguguuuuauugguaggagcauccgcaugaacauacuuggaauagcacguccugcggccucagccgccucuuccgccauccuccguaggcugcauucugcccuagugagcgccgguuuuu

SEQ ID NO: 2097 - RNA, 6240 nt, Homo sapiens
cugcgugaugggacaucaggcagcuuuauuuauuuacucuuaaaacuguuacaacagaaucauggacugacacagguaauggcugagccauaagcaaaucgagaaguacagaaaugucccaccccaaacagcugcggaguacacaucacacagggccucuggucccggccuucucaggugcucuggaguggaggauccuuugagggaacucugaccacuccuguugucuaccuagagagcacgccacuugggccaccuacccccaaccuuuggccaaaggagugaaaggaccuggaaccugucgucaaccucagcauccucaugaccccaggacagacgcaguggaggcagcagguacucugggccugugcuguugccccugaggugucuccugacuacgcaacccuguuuccuucccacuuucaucccagcaggcccuuucuuccugcugacaaaacacuggcucccucauguucuuggcacagcagaaguguucugcacauggucucuacggaggaaagcuggucccccuggcccaggcagcacuuccuccgugagccccugcaguuuccuggugugugcuuggggagcuagggacauggugucaaaccuccacaaggcacugcuaccucagaaagggggaggaccugucaggcccaggacagccucccugcacauggagaucaaaucuaaacuuaggucaagaccccuaccuucuccagggaugccaggaccagagaagggcagaggucaggagggggcaugaggaggccaagucuggggcagccuccucagaggcaaaucuacacugcagccaaucccccuccagagaagcccuuggaaucucccaggccauuucacuacaaacuuauguuugaauccuuuauuagaaaccaugcaaacuuuaauacaaaaaauacaagugcaauaagaaucuuugugucaauacaguucccgggauuucuccucacugcagccaucccaaggccuagcugggaugcccucugugggccuugccucuccucccuccccucuccagucagggcauaagggaagcagauagccuuagucucaugccuuuuauuuuuaaauuuccagaccugauuuccuacuaucugcaugaggcucccuuggacaugagggcuuacauguccuagggugugggugccggccugaaggaauuccaucuccuggcccuuucuuguucuccagcccuggcuuuuuauccuagggcugaccaccagaucccagggaaugggacagagaugccaaaaccagccucuugguuagaaaagaaaagcagcauacacacaacaaaauggcaaaaccaaccaguccacgcuccaagggccccuugugugccugaccggcucaccagccacagccucugcaccccucuucccugccgcaccgccuccagggcccuaagcugcccacauccuccagcggggguggcauaaggauaucuccgcccuguucccucuaacacuuacugaggacuuucauguagacauggcuucaaccugcagaacuauuuugccaguuuuuagguuauuagaaaaaaauaaaaggacaaaacaagaaaaaugugacagcagcuaggcggguauguuaagcauggggacaggcagcacugacccccaacuuggggcagggcagcaagaagggcccgacaccaccugcauggggaggggggggcgcccauuugugggaccagagggagaggcaguggcuuaagcuccacggucagcguccugucaccacucggaauccaccuccacucuucccuccagguagauccagggagaagggagggcaugucaguuucuuuuggguuuggaccaaagaaccaaaaaaagaugaggauagaaucugguucuccucuccuagaucccaacuuagccucaaccaccccaacccccucccaaccuccuccacggagcaguggcgcagugauggggcaagaccaaagcagggagaugggcccaggcuggggagugagaggagguguggggcagggcugcugcugccccgggcacgcaaagcaggagggaaggcgagccuagcgggcugcccagcacggcgcccaagcgcucacuggucuaguggacagcccgggaaagggggccaaggacccgggagcccgaguuggggccgccagggaaguguggggggcgggagacaaugucggccccguggucggugcgggcccuggcauuugcccggaacgucagccuguaggucucaaucugcagugacaugggaggagggaagggagaggggaacaggggagacaagaggggaacacgggggagacggaagacgagaccagaaugucaucauuagaugcuugucuccuggaucuggcuguccaaggucugggccucccuuuggucaccacccccugacagggugggguggccauugaggccacuggcugaagugggggcgccagcuucaggcgcugccucagagauggccggcuccuccccagcagggggacccggacacagaggagccucgcugccaccgcccucagucuucacagcaccuccugcagguagguggcccacauuaucgagggaucccaccuuggccugggccuucuccuugaaguucaacuucugacuuucaaucuugacaucuccuccaccaggcuugugcuugauguuagccuuagacccacacuuggaggagaccuuagagauguccacuuucuuguucugaaucugaacauuaccaccuccagggacaugcuuaauauuguccuuggaaccacacuuggacugaauauggcuguagcucacuuuuuuggagacuaucuggacuuuccccgcagguuguuucugugcacuugcaauugggccggcuguuuuagugacugcauuagauucaggcuuucggguuguagcagcugccucuguuuuuuucucuacuuuggcccggccuccuccaggcugaugcuugauguuuuccguggagccaaccuuggagcggacauucuucagaucaggagcagaaguauugguggccaggcggcugagccggggggugguggagcuggguuuggccgaggugggcuucuugucuaugaaaggaguuguggagggccgggagggcauggguguggccuugacucggcugggaaccaccccugcagcgggggcugucccacugagaguggugguuuucuucauggaacugguggaggugcucuuugggcgacucaagucagcugguacagacuuugcagucaucuucuugacuucugcagguuuucccucagucuuaauggcagugggcuucuugggcaggagcguggaggggcuccuacugcuugggccaguugaggcaacagcagcagcuguugugguuuuugcaacagucugagugcucuuggacccagaucuggaggcuggggcagaagcuggcuuggauggugaggcccgcuucucaggagccuuugcaucugcaaugggcuuuggcuucacgucuuuugaagguaagauggaaggccuggcagaggcgacggcagggcguuuggguggggcagcuggcacuaagccugaagcaaggcucauggguuuuuuauucaacccaccaaugguggugggagcuggcugcuuagggagagaagugggcuguguuuuggcuuucgauguugaagucuuugcagguugagugguggccaaaggcuuuguuuucuucucugggcuuggugggagcuccuuguucggugggguggugaugucauuuccugucccacucaccacaggccuuccuucuucuggccuggcuauuccaagcuucucuggcucaucgggcccugugccugcaaugcagcugcucuccagaccguaggugggauccacuuucccagaggcucgugcugcuucuuguacuuucuugacaugagcuucaaccaauuccagugguaccuccucccggacccgagaaaacuccuccaaagccgcuuuugcugcagcagaugccacgcgaggguccaccacagaugccaaaaaagcaacaguacucauaacuggauuuccugacugacugaaggggacaggcugguaggccaaaggcccaagggaagcaucugaauucucaagguauggguccucaaugggaagucucaaaaaguggaggaugcauucauccugaguacgacuuccaacauguuccgacacuuuguuccaaucauccuuguacaucuccagggccuccaggaguagaagggucuccuguucaguccauucucuuccagcacuagcaccuuuacucuuugcuaauguuuucuuggaguaaaugucaguacggagaccaaaguucugcaaaucaacugguuuuuccuuguuuuucucaggaaaauuuagcaucuguugagcagcaggaaccugaggugaucgaagaugcagaggcacaagcccagaggggguaucagcuaauacauuaaaaugaggaguaggaggaggucccauugccaugggucuacuuuccgggucaacuugguaauuaacgaguccccacugcucuaaaaaggcauggacccucaucacagcacacacaucuccagucaaguuccuccgacaagcagugcuaguuaaauacucuuggggguuuagacgauacgugucaaucauaaaauuucgauaugccaaguauauuucuggagucuuggauuuguuuuuuccauugaagaacucaggaagagcacgccguucaaucacaugaauacaguuauaaucaaaccaugaugcauaacuaggaauaauaaugugauuggucugcucugucacauuaucuuccccaaggucaacugaucgacucugaucaccuuuggcaggaucuucaucuuccuuuccuccugcugugacuguuucuucauccugcucaucuagauccgcuacaguuccuccuuuaacagguguauuuucacuaucuuucuuuagguucacauuuuugggaaguacuacuucuucuauauuggguacagguguugggucuuccauauccuugguuagaucuucuugcucaucuuccucuuucugacuucugcgcuucccauaaaggcuagcuuggccuuucuucccacucuucuuccgugauucuguuggugucggagggggaggcgaaggcgaauguuuccucuuucgagcauuagcugaugcuuuucuaucucuucuuucuggacuucugacuggcucuucauucuugguugaaauccgcugacgaaaacucacaggcuuccuauuuucauccaccucauaauccuccucauucauccauucauugaaaauaucaguguccaaaauccauuucacaugaaccuuccaugguuuuucuggaauugguggaucuucaauuucagcaucaacaucauuacuauggacccaaguaucauagcugucuggguaaaagccccaaugcacuaacacuugcuucucuuuucucaucaccggucucaaccauucuucaucgucuugugaggaagaauauggguaaauguggugggaagcuuuugacuucucauccguaaauguucccugaugucguuugaugauaucuuucaauuuguuagccaacuucagaucaaugucuggaaugagguagauguugggucuggucaaacaauuguucugcaccaauguuuuuucaauguucauaaacauuuccacauuacgauccauucgagauggguucuguaggucaaaccuccgccaucccuguucauuuuuauacuuguaagcagccccaagaaugugacauaaggcgccuccagcuuugaaauccaugaaacacuuugcagggaguuuggugaaggccggguuggugacaugcuucccaaaggcaucuuccuggaacugaagaagcugcaccaccagcccagccaguguuuuauugguaggagcauccgcaugaacauacuucuuguagugcuugcccagccagacccgcaccgaauccagcugggacaccgucuccgggcucucccaaaacuugguggccgggcccccauccuuccgucgauaaacagcuaggccugcggcugccgccgcaauccccgagcccguggcgccuaccgcuguccccggcccgccgccgcccgccgcugcggccaucgucgcagcccgucguccccacagccuggcccaccccggcccucgcgguguuucccggucguucccgcgcgcacccccgcgcgcguagccgccacugccgcuucccggccccgcccag

SEQ ID NO: 2098 - RNA, 2877 nt, Homo sapiens
cugcgugaugggacaucaggcagcuuuauuuauuuacucuuaaaacuguuacaacagaaucauggacugacacagguaauggcugagccauaagcaaaucgagaaguacagaaaugucccaccccaaacagcugcggaguacacaucacacagggccucuggucccggccuucucaggugcucuggaguggaggauccuuugagggaacucugaccacuccuguugucuaccuagagagcacgccacuugggccaccuacccccaaccuuuggccaaaggagugaaaggaccuggaaccugucgucaaccucagcauccucaugaccccaggacagacgcaguggaggcagcagguacucugggccugugcuguugccccugaggugucuccugacuacgcaacccuguuuccuucccacuuucaucccagcaggcccuuucuuccugcugacaaaacacuggcucccucauguucuuggcacagcagaaguguucugcacauggucucuacggaggaaagcuggucccccuggcccaggcagcacuuccuccgugagccccugcaguuuccuggugugugcuuggggagcuagggacauggugucaaaccuccacaaggcacugcuaccucagaaagggggaggaccugucaggcccaggacagccucccugcacauggagaucaaaucuaaacuuaggucaagaccccuaccuucuccagggaugccaggaccagagaagggcagaggucaggagggggcaugaggaggccaagucuggggcagccuccucagaggcaaaucuacacugcagccaaucccccuccagagaagcccuuggaaucucccaggccauuucacuacaaacuuauguuugaauccuuuauuagaaaccaugcaaacuuuaauacaaaaaauacaagugcaauaagaaucuuugugucaauacaguucccgggauuucuccucacugcagccaucccaaggccuagcugggaugcccucugugggccuugccucuccucccuccccucuccagucagggcauaagggaagcagauagccuuagucucaugccuuuuauuuuuaaauuuccagaccugauuuccuacuaucugcaugaggcucccuuggacaugagggcuuacauguccuagggugugggugccggccugaaggaauuccaucuccuggcccuuucuuguucuccagcccuggcuuuuuauccuagggcugaccaccagaucccagggaaugggacagagaugccaaaaccagccucuugguuagaaaagaaaagcagcauacacacaacaaaauggcaaaaccaaccaguccacgcuccaagggccccuugugugccugaccggcucaccagccacagccucugcaccccucuucccugccgcaccgccuccagggcccuaagcugcccacauccuccagcggggguggcauaaggauaucuccgcccuguucccucuaacacuuacugaggacuuucauguagacauggcuucaaccugcagaacuauuuugccaguuuuuagguuauuagaaaaaaauaaaaggacaaaacaagaaaaaugugacagcagcuaggcggguauguuaagcauggggacaggcagcacugacccccaacuuggggcagggcagcaagaagggcccgacaccaccugcauggggaggggggggcgcccauuugugggaccagagggagaggcaguggcuuaagcuccacggucagcguccugucaccacucggaauccaccuccacucuucccuccagguagauccagggagaagggagggcaugucaguuucuuuuggguuuggaccaaagaaccaaaaaaagaugaggauagaaucugguucuccucuccuagaucccaacuuagccucaaccaccccaacccccucccaaccuccuccacggagcaguggcgcagugauggggcaagaccaaagcagggagaugggcccaggcuggggagugagaggagguguggggcagggcugcugcugccccgggcacgcaaagcaggagggaaggcgagccuagcgggcugcccagcacggcgcccaagcgcucacuggucuaguggacagcccgggaaagggggccaaggacccgggagcccgaguuggggccgccagggaaguguggggggcgggagacaaugucggccccguggucggugcgggcccuggcauuugcccggaacgucagccuguaggucucaaucuucacagcaccuccugcagguagguggcccacauuaucgagggaucccaccuuggccugggccuucuccuugaaguucaacuucugacuuucaaucuugacaucuccuccaccaggcuugugcuugauguuagccuuagacccacacuuggaggagaccuuagagauguccacuuucuuguucugaaucugaacagggaguuuggugaaggccggguuggugacaugcuucccaaaggcaucuuccuggaacugaagaagcugcaccaccagcccagccaguguuuuauugguaggagcauccgcaugaacauacuucuuguagugcuugcccagccagacccgcaccgaauccagcugggacaccgucuccgggcucucccaaaacuugguggccgggcccccauccuuccgucgauaaacagcuaggccugcggcugccgccgcaauccccgagcccguggcgccuaccgcuguccccggcccgccgccgcccgccgcugcggccaucgucgcagcccgucguccccacagccuggcccaccccggcccucgcgguguuucccggucguucccgcgcgcacccccgcgcgcguagccgccacugccgcuucccggccccgcccag

SEQ ID NO: 2099 - RNA, 3067 nt, Homo sapiens
cugcgugaugggacaucaggcagcuuuauuuauuuacucuuaaaacuguuacaacagaaucauggacugacacagguaauggcugagccauaagcaaaucgagaaguacagaaaugucccaccccaaacagcugcggaguacacaucacacagggccucuggucccggccuucucaggugcucuggaguggaggauccuuugagggaacucugaccacuccuguugucuaccuagagagcacgccacuugggccaccuacccccaaccuuuggccaaaggagugaaaggaccuggaaccugucgucaaccucagcauccucaugaccccaggacagacgcaguggaggcagcagguacucugggccugugcuguugccccugaggugucuccugacuacgcaacccuguuuccuucccacuuucaucccagcaggcccuuucuuccugcugacaaaacacuggcucccucauguucuuggcacagcagaaguguucugcacauggucucuacggaggaaagcuggucccccuggcccaggcagcacuuccuccgugagccccugcaguuuccuggugugugcuuggggagcuagggacauggugucaaaccuccacaaggcacugcuaccucagaaagggggaggaccugucaggcccaggacagccucccugcacauggagaucaaaucuaaacuuaggucaagaccccuaccuucuccagggaugccaggaccagagaagggcagaggucaggagggggcaugaggaggccaagucuggggcagccuccucagaggcaaaucuacacugcagccaaucccccuccagagaagcccuuggaaucucccaggccauuucacuacaaacuuauguuugaauccuuuauuagaaaccaugcaaacuuuaauacaaaaaauacaagugcaauaagaaucuuugugucaauacaguucccgggauuucuccucacugcagccaucccaaggccuagcugggaugcccucugugggccuugccucuccucccuccccucuccagucagggcauaagggaagcagauagccuuagucucaugccuuuuauuuuuaaauuuccagaccugauuuccuacuaucugcaugaggcucccuuggacaugagggcuuacauguccuagggugugggugccggccugaaggaauuccaucuccuggcccuuucuuguucuccagcccuggcuuuuuauccuagggcugaccaccagaucccagggaaugggacagagaugccaaaaccagccucuugguuagaaaagaaaagcagcauacacacaacaaaauggcaaaaccaaccaguccacgcuccaagggccccuugugugccugaccggcucaccagccacagccucugcaccccucuucccugccgcaccgccuccagggcccuaagcugcccacauccuccagcggggguggcauaaggauaucuccgcccuguucccucuaacacuuacugaggacuuucauguagacauggcuucaaccugcagaacuauuuugccaguuuuuagguuauuagaaaaaaauaaaaggacaaaacaagaaaaaugugacagcagcuaggcggguauguuaagcauggggacaggcagcacugacccccaacuuggggcagggcagcaagaagggcccgacaccaccugcauggggaggggggggcgcccauuugugggaccagagggagaggcaguggcuuaagcuccacggucagcguccugucaccacucggaauccaccuccacucuucccuccagguagauccagggagaagggagggcaugucaguuucuuuuggguuuggaccaaagaaccaaaaaaagaugaggauagaaucugguucuccucuccuagaucccaacuuagccucaaccaccccaacccccucccaaccuccuccacggagcaguggcgcagugauggggcaagaccaaagcagggagaugggcccaggcuggggagugagaggagguguggggcagggcugcugcugccccgggcacgcaaagcaggagggaaggcgagccuagcgggcugcccagcacggcgcccaagcgcucacuggucuaguggacagcccgggaaagggggccaaggacccgggagcccgaguuggggccgccagggaaguguggggggcgggagacaaugucggccccguggucggugcgggcccuggcauuugcccggaacgucagccuguaggucucaauuugucuccuggaucuggcuguccaaggucugggccucccuuuggucaccacccccugacagggugggguggccauugaggccacuggcugaagugggggcgccagcuucaggcgcugccucagagauggccggcuccuccccagcagggggacccggacacagaggagccucgcugccaccgcccucagucuucacagcaccuccugcagguagguggcccacauuaucgagggaucccaccuuggccugggccuucuccuugaaguucaacuucugacuuucaaucuugacaucuccuccaccaggcuugugcuugauguuagccuuagacccacacuuggaggagaccuuagagauguccacuuucuuguucugaaucugaacagggaguuuggugaaggccggguuggugacaugcuucccaaaggcaucuuccuggaacugaagaagcugcaccaccagcccagccaguguuuuauugguaggagcauccgcaugaacauacuucuuguagugcuugcccagccagacccgcaccgaauccagcugggacaccgucuccgggcucucccaaaacuugguggccgggcccccauccuuccgucgauaaacagcuaggccugcggcugccgccgcaauccccgagcccguggcgccuaccgcuguccccggcccgccgccgcccgccgcugcggccaucgucgcagcccgucguccccacagccuggcccaccccggcccucgcgguguuucccggucguucccgcgcgcacccccgcgcgcguagccgccacugccgcuucccggccccgcccag

SEQ ID NO: 2100 - skipped

SEQ ID NO: 2101 - RNA, 5690 nt, Homo sapiens
uugcuguacugugauuuaccuauucagguuuauuuaauaaauacaguagagguuaacagaugauagugcaaguucaauagaaguagggugauuuaaaaacauucuggauuacaaugaaaacucacuuaugugggaguuugagcucacauuuacagccuccaccagcagaaaucaugcaaauaagaaccacugcagaguucuuuguccacagacaccaucucccuucaggaugguccugcuuuucccccagcaccugugcaggcaucucuggcgagccuuaucacagucuuucugaguuugccuguaugcuucacauaaauguaguaaaaaaacaaugagacgcuucuuuggggcaacugcuguagaggccacuaaugagaaaguguagauguuuccaucauggaaaauuacaaguuuacuugguuucaguccuuggcacuaagucuuagguuccuugucacugaacagccuucuuuccacuuggcuucucuuggccagcauccuggcacaccaucagaggagaaaauaaugagaaagaagugucuuacagggauggggagcacugguggcuuaccauaugggcauaaucauggcucuucaaacaaauccuugaccagacaguagcacuauuugucuucuugccuacacaagcuacaugugggguucacaccuccugaaacaugugcacacuaagagaacuggagaauguuugcucaguuucccuccuuuucaggggaacccucuggcuggucuucaguacaugagcagugacccagcugugguuagcuccagagaguuuucuaagagucccucauguucuuagaguucugauguugcuuagaagacagaggccuaccucauucuugguuuacucaugcuucagguuacaugaaugugggguggggagugggaaauagcuuuauaauuuuuguagaaauuauauaaggagucaggaguuugagacugcccgggccgagucuggcuuacacaccgguugaauucuuguccagcgcccaagaagaaugagaauguacugacaguggaagagugagcacuugcuaauuauaaaaaugccaaaggauagcuaugugggguaaaaagcaccugagaucucaccaugcagagguaacaugugcaucccuuuggugagaauuucuaguaaucugucugauguguauaauuauucauccagcauuucccaaauauauuugugaacauaguguuaguuuguguucauccaggagccaauccugagacagagaccggaaagcaagaaaugcaucugggaggucagcaugugguaaaggggagcggggaaguaaggcagggagggugaggcuggugguuaucagguuagcugcuccuguggguggcuggguggugcucagucccacggaggaacuguggaaaagaguauggaacgugugccucagcaaugcuuaccugagggcgagggagcuggggcauuuacagccaaggugcuguuggcugaggcugcucccugggggugugacuucugagcacuuccagccugcacagccuacuaagacaugugagaaagcacccccgcaaccacugccccuaggaaagaggcagacacuggcagccggaaggcagccagacacauacuuauuggucguauugcuuaggagaugcgucaggcacuguucuaggugcuggggacauggaaggaaacaaaacagagaauucugccaucauggaacauucugucuauugggggaaaauaauaaacagggcaaguaagaaaccauggaguguguuaggcaguaucaaguacugugaagaaaaacgaaguaggaaagggaguucugggaagggggacaggagauggguugcaaacagcgaaagaggaaugagggcaggccucacugagaaggugacacucaaguaaaggcuggaaagagggcagagggaggcacuucacaugguuaccugggaagaggaaauagcaggagcaccagcccuaaggcaggaauaugccgaggcaugugugcaaggcccgugcggcugggcugggagggcaggguaagcggggccgugcugaccucugugcagccucaggcuccuaccuggggcaagaccgaaggcuguaggagagugggagcauuaacaggguggcaacagcugcugugcugugaacagcccaagaggggccagggcggaagcagagaggacugaggaggccggggaggagggugaagcaguuaagauucuggagauauucugaagguagagccaaaagacuugcagacagauuggaugugagguaugauagaaagaaagaagccaauggauuugguuugagcaacuggauggagcuaccucuuccugaaucagggacauuuuccaaaggaguggcacaggauuuuuuucucggucacuuugcaagccagggaccucuggcuggugacggcccaccugggccucgcuugaccaugcuaccugcugcaggagacggcccgcccacuucacccgccugggccaaguauggcuuccacacugguugaguucuugcccagcaccaaagaagaaugagaaugugcugacaguggaagagugagcaaagcugggaguuuuauugagugaugaaacaguuuucaacagagaggagacguggggguggucccccuacccaaaggcaggaaaguccccuuaauaugggggagucugggucuuuuuaugggcucagaauggggggaggggcaggcuguagguauuacuggaaaaggcaacauucgauugguuaaggcguuauucagaaagaacaauugggaaagggugggcaaacaggaacagaaguucccacucugcgugguggguuucauccaggaccagcaaucuggucuuuuagccuucaggcugaucuuugcuugaacgugggguuucauuugggacccuccccucucugccuaggcauuuggcugccucaugucacuaucaggagcaagccuggggucaggaguaauugggagccuggcuuugggccugugaaaucugagauguccauuagagaccuaaguggagaugucaguagcaaacugaauauaggggucugcaguucagggaagaggcccauucuggguuuaaacugagguguuagacagcauguagaugguauaauccauguggcugcuggagacaccccagugagcaagccagauagaaaagaggucugggacugaguccucagggaggcagagcacugaacaaaggaaccugagaaggagcaaccagagagcuugguguccugaaagccaaacgcggaaaguacuuccaggagaagggaguggucgacuguguguguguauauauauauauauguacaugugcuacauuuauaaagaccuccaugcagaaauauacacucucucuacggauauauacauacacacagggagcuguagauaaugguguuauacuauagaaacagaucuauaacucuaucuacuucccacuaaaucuacuagggacagugugccauggcaacacugucugucugcuuucaucauuuuuuucauagcugcauaguauuucauugugcccaagaaccguaauuaacuuuuucccuauagguauuuuccccaauauagaauucuagauuauacagcaaugaacaccuugugcaaccauccuuucacacuuguguagccaucuccuugagauaaaccccuaagagcagaguugcuauaggcaaggguaugcccuuuuuaccuucugauucugaacuccuuccugggcagccccacuaaucagaugcauucaacguggaacagcugcugaccucaaggaagaacugcccaggacaucauuccaggcagacucuaugcuagggacccuucuguacacagagaagaugcagggcagccacuacauaaucacuguuagaaaucagcaaagguuugcaucauuacaaaagucuaugacaggaggcaaucuacugguucuagcucucagccugacguaucgagcugcagcggacuucugcguauaaagacuguccuguuuccacggagagaggagcaacucuccaggccuaaaggaucuccagcugagccacgaagagcuuaucacaucaagagcaaaugcagcagacgaaggcagugccuucugugaaaugacuguaauuaacuccaaaucuuucuccacacuuuauuuuugcuggcuggauuugucauuuugcugucagaacaggccuacaacauaccucagauguuuuuccuuuaccuugucauucugagcaaaagcaugacuccaucaccugucugggcacauaccgagucuuugucuggauggugucagcacauccugcacacucagcggcaacccugaaaauaacaucuaccaccugccaggcaauuggcugacugccuccgugaucuucaggggcaucgagggacaauguauuuagucaugcaccucuguaagugcagggaaauguacugggacaccuuucgauucccaaggaaauaaaaggaaaaugacaaacacauagucacgcuguggaucccuguuuauucccaucucugggcaggccuguaaagagcaucgacccaggucucaaccccacugcugguaacugagccacagaaacuguaagcacucauccagggagaacuacuccccuaaaccgguucuuagccagcaagagaggcccacaggaaggucucugauaaccugaaguuuugaaaagcuuagaacugugugaucaggccauaugccccucaguuccugaauguucacuacccuguggugucccuuugccauggaagagacuccaaccacacacaucaguuaagcugccaacacuguuuccuccccauucugcucugcgaacaacgcacaguccagccaggagcucaacagggaggguuuucuuguugugucauggcugagaucaaagucauuguacaccaaggacauaguggacagaagggagccaacaacauuuaugccaaaucccauucccaagaugacuauauuuuauaguuuauuaugagguaacugccuccagacagauaagccccugcaugaugcugaaagucagagccugggggugaaugccaccuuaucuuuguccuccucagcuggucugcgugucucugcucagaacgcuguguaguagugcuccauugugcugacaaugucacucugguccuccaggagcuccagaacuugcugcagcacagccucgcucaggcccgggcggaugcucaggcgagcacaggccaagaugugcaggaagugacagcccuucuccaugugauuugguuucuggcaguccugcugaaugauccgguggaucuuucugugcaggucuuugucuucucugguuacauaguauagguuaucaaaaccaucaucuuucuggaaaacaaguccuuuuuccugcagcaguuguauagcauucuuaaauauacuaugaauugccuuggaagugguguccuucuuaaaauucacguagugcuuggagggguuccuccgcuucuccacguccaccacgguggcauccugcacgcaguaggcgagcaucuucccccacaaagcgaguggcgcccccggcggcgucaccuucucaucccggccgggcuccggcuccuucuccagcugccggggucccggggccgcccgccaccccggcccggcgcgccgaacgcugcccggacucccgg

SEQ ID NO: 2102 - RNA, 5801 nt, Homo sapiens
uugcuguacugugauuuaccuauucagguuuauuuaauaaauacaguagagguuaacagaugauagugcaaguucaauagaaguagggugauuuaaaaacauucuggauuacaaugaaaacucacuuaugugggaguuugagcucacauuuacagccuccaccagcagaaaucaugcaaauaagaaccacugcagaguucuuuguccacagacaccaucucccuucaggaugguccugcuuuucccccagcaccugugcaggcaucucuggcgagccuuaucacagucuuucugaguuugccuguaugcuucacauaaauguaguaaaaaaacaaugagacgcuucuuuggggcaacugcuguagaggccacuaaugagaaaguguagauguuuccaucauggaaaauuacaaguuuacuugguuucaguccuuggcacuaagucuuagguuccuugucacugaacagccuucuuuccacuuggcuucucuuggccagcauccuggcacaccaucagaggagaaaauaaugagaaagaagugucuuacagggauggggagcacugguggcuuaccauaugggcauaaucauggcucuucaaacaaauccuugaccagacaguagcacuauuugucuucuugccuacacaagcuacaugugggguucacaccuccugaaacaugugcacacuaagagaacuggagaauguuugcucaguuucccuccuuuucaggggaacccucuggcuggucuucaguacaugagcagugacccagcugugguuagcuccagagaguuuucuaagagucccucauguucuuagaguucugauguugcuuagaagacagaggccuaccucauucuugguuuacucaugcuucagguuacaugaaugugggguggggagugggaaauagcuuuauaauuuuuguagaaauuauauaaggagucaggaguuugagacugcccgggccgagucuggcuuacacaccgguugaauucuuguccagcgcccaagaagaaugagaauguacugacaguggaagagugagcacuugcuaauuauaaaaaugccaaaggauagcuaugugggguaaaaagcaccugagaucucaccaugcagagguaacaugugcaucccuuuggugagaauuucuaguaaucugucugauguguauaauuauucauccagcauuucccaaauauauuugugaacauaguguuaguuuguguucauccaggagccaauccugagacagagaccggaaagcaagaaaugcaucugggaggucagcaugugguaaaggggagcggggaaguaaggcagggagggugaggcuggugguuaucagguuagcugcuccuguggguggcuggguggugcucagucccacggaggaacuguggaaaagaguauggaacgugugccucagcaaugcuuaccugagggcgagggagcuggggcauuuacagccaaggugcuguuggcugaggcugcucccugggggugugacuucugagcacuuccagccugcacagccuacuaagacaugugagaaagcacccccgcaaccacugccccuaggaaagaggcagacacuggcagccggaaggcagccagacacauacuuauuggucguauugcuuaggagaugcgucaggcacuguucuaggugcuggggacauggaaggaaacaaaacagagaauucugccaucauggaacauucugucuauugggggaaaauaauaaacagggcaaguaagaaaccauggaguguguuaggcaguaucaaguacugugaagaaaaacgaaguaggaaagggaguucugggaagggggacaggagauggguugcaaacagcgaaagaggaaugagggcaggccucacugagaaggugacacucaaguaaaggcuggaaagagggcagagggaggcacuucacaugguuaccugggaagaggaaauagcaggagcaccagcccuaaggcaggaauaugccgaggcaugugugcaaggcccgugcggcugggcugggagggcaggguaagcggggccgugcugaccucugugcagccucaggcuccuaccuggggcaagaccgaaggcuguaggagagugggagcauuaacaggguggcaacagcugcugugcugugaacagcccaagaggggccagggcggaagcagagaggacugaggaggccggggaggagggugaagcaguuaagauucuggagauauucugaagguagagccaaaagacuugcagacagauuggaugugagguaugauagaaagaaagaagccaauggauuugguuugagcaacuggauggagcuaccucuuccugaaucagggacauuuuccaaaggaguggcacaggauuuuuuucucggucacuuugcaagccagggaccucuggcuggugacggcccaccugggccucgcuugaccaugcuaccugcugcaggagacggcccgcccacuucacccgccugggccaaguauggcuuccacacugguugaguucuugcccagcaccaaagaagaaugagaaugugcugacaguggaagagugagcaaagcugggaguuuuauugagugaugaaacaguuuucaacagagaggagacguggggguggucccccuacccaaaggcaggaaaguccccuuaauaugggggagucugggucuuuuuaugggcucagaauggggggaggggcaggcuguagguauuacuggaaaaggcaacauucgauugguuaaggcguuauucagaaagaacaauugggaaagggugggcaaacaggaacagaaguucccacucugcgugguggguuucauccaggaccagcaaucuggucuuuuagccuucaggcugaucuuugcuugaacgugggguuucauuugggacccuccccucucugccuaggcauuuggcugccucaugucacuaucaggagcaagccuggggucaggaguaauugggagccuggcuuugggccugugaaaucugagauguccauuagagaccuaaguggagaugucaguagcaaacugaauauaggggucugcaguucagggaagaggcccauucuggguuuaaacugagguguuagacagcauguagaugguauaauccauguggcugcuggagacaccccagugagcaagccagauagaaaagaggucugggacugaguccucagggaggcagagcacugaacaaaggaaccugagaaggagcaaccagagagcuugguguccugaaagccaaacgcggaaaguacuuccaggagaagggaguggucgacuguguguguguauauauauauauauguacaugugcuacauuuauaaagaccuccaugcagaaauauacacucucucuacggauauauacauacacacagggagcuguagauaaugguguuauacuauagaaacagaucuauaacucuaucuacuucccacuaaaucuacuagggacagugugccauggcaacacugucugucugcuuucaucauuuuuuucauagcugcauaguauuucauugugcccaagaaccguaauuaacuuuuucccuauagguauuuuccccaauauagaauucuagauuauacagcaaugaacaccuugugcaaccauccuuucacacuuguguagccaucuccuugagauaaaccccuaagagcagaguugcuauaggcaaggguaugcccuuuuuaccuucugauucugaacuccuuccugggcagccccacuaaucagaugcauucaacguggaacagcugcugaccucaaggaagaacugcccaggacaucauuccaggcagacucuaugcuagggacccuucuguacacagagaagaugcagggcagccacuacauaaucacuguuagaaaucagcaaagguuugcaucauuacaaaagucuaugacaggaggcaaucuacugguucuagcucucagccugacguaucgagcugcagcggacuucugcguauaaagacuguccuguuuccacggagagaggagcaacucuccaggccuaaaggaucuccagcugagccacgaagagcuuaucacaucaagagcaaaugcagcagacgaaggcagugccuucugugaaaugacuguaauuaacuccaaaucuuucuccacacuuuauuuuugcuggcuggauuugucauuuugcugucagaacaggccuacaacauaccucagauguuuuuccuuuaccuugucauucugagcaaaagcaugacuccaucaccugucugggcacauaccgagucuuugucuggauggugucagcacauccugcacacucagcggcaacccugaaaauaacaucuaccaccugccaggcaauuggcugacugccuccgugaucuucaggggcaucgagggacaauguauuuagucaugcaccucuguaagugcagggaaauguacugggacaccuuucgauucccaaggaaauaaaaggaaaaugacaaacacauagucacgcuguggaucccuguuuauucccaucucugggcaggccuguaaagagcaucgacccaggucucaaccccacugcugguaacugagccacagaaacuguaagcacucauccagggagaacuacuccccuaaaccgguucuuagccagcaagagaggcccacaggaaggucucugauaaccugaaguuuugaaaagcuuagaacugugugaucaggccauaugccccucaguuccugaauguucacuacccuguggugucccuuugccauggaagagacuccaaccacacacaucaguuaagcugccaacacuguuuccuccccauucugcucugcgaacaacgcacaguccagccaggagcucaacagggaggguuuucuuguugugucauggcugagaucaaagucauuguacaccaaggacauaguggacagaagggagccaacaacauuuaugccaaaucccauucccaagaugacuauauuuuauaguuuauuaugagguaacugccuccagacagauaagccccugcaugaugcugaaagucagagccugggggugaaugccaccuuaucuuuguccuccucagcuggucugcgugucucugcucagaacgcuguguaguagugcuccauugugcugacaaugucacucugguccuccaggagcuccagaacuugcugcagcacagccucgcucaggcccgggcggaugcucaggcgagcacaggccaagaugugcaggaagugacagcccuucuccaugugauuugguuucuggcaguccugcugaaugauccgguggaucuuucugugcaggucuuugucuucucugguuacccggcaguauucaucgaugggcuucagucucuucacagcuacgucccggauguggcuucugcggaagaggaucuugccugggaggaaggggaugauccuuugcuugggguccuucuggccaccuucaaugggaaacuuauccaaaagcugcaucugcaggucaaagaacuugcuguaccuccgguagauagucugggagguggagucagaccaggucacauugauuauguauacguagugcuuggagggguuccuccgcuucuccacguccaccacgguggcauccugcacgcaguaggcgagcaucuucccccacaaagcgaguggcgcccccggcggcgucaccuucucaucccggccgggcuccggcuccuucuccagcugccggggucccggggccgcccgccaccccggcccggcgcgccgaacgcugcccggacucccgg

SEQ ID NO: 2103-2104 - skipped (2 entries)

SEQ ID NO: 2105 - RNA, 2766 nt, Homo sapiens
ugucgugguuucauaguggacuuuauugggaaaaguuaguuaguguaaaaaacauucaaauuaauucauaaaauuuaaauaaggugauaguaaauuauaccuuguaguuaauaguaaucaaucaaucaaucacuacaguaaucacaaauaagguaaagucuaaauuacugccuuagcaaacacuauguugucagguuuuucugcugcaagcccaaggcgggaaacacugcaguuauuagaagugagcccaaugaugaauuugcauuugaagcugggagaaagaggaaaaaaaguguguucugauuauggcaucgagacacuguagccuaaaaaagcaacuuuauuaauguccugcagcagcguacauuaguaauuauaacaaugcauuaaaauuuucauuucaugucauagagaaucaguuuucuucaugauacauuauguuuuacugagugaguuugucccuccagagaccuuucugggaacaugccuucuccagggacugcuuccuaagaugcccagguugcuuaccacaggucaucuuuggucauuuaaaagcagucaagcugucuggacugcacccucucaacugaaguugagccaaauucccuucucucaaacccuaacgccgccaucacuaagagaaugggcaucucggcuuggucagagcauuacuaacaagcuaaugugggauucucuuugguuaugaauuuuuauuuuuauuuaagcauacaaaaaauacagcuagaaguaggcuccugcauucuaaaagcauuuuuaaucaacuuaaacuauguucuuggaaaauucaccaccuggacugguucagucugcccauuucccuguggaaucuaguaucaguguuguauuuagcaaauucauuugagugacgaacagugacugauauucaggagccccgaggggugggggcggccggccugggcagacuuagaugcuguccauagcuuugaacucgcugagggccugcaccggguucacgugcuucuucugagaugcccguuuaaucuuggucugugucucauccuguuucucucucuucaccaauggcuuuuucucuggugccuucaucuuccaugacacagcaggaagguugagggaagccauacccugugacuuuugguauuugguagaggcgacguaggaugccuucacugucugcaccacagcauucaucaaguucuuggcugccuggaucagggacauggcgcuguccaccccagagacaacaagcuccccgccgagauucugcaccucggccuugaccuugcugcagauguucagcugguggcaguagagggcgaugcguugcagguaggccagcagguccugcuugcaagccgagucggggcaauggucugcaauggugcggccaagcuuguccauccuggauccugccucagcaauuuucuuggcagcacugaugacauccgauguauuuuugagugguccuuuaccucggguaaagucugucaucuccaucauaaucaugcacaucugcuuggccagcacaaugaugucauugccacugucgucccauuuggacacuucagcauccagcuugcucuuuucuuccuggaagcuggccaccuguuccgcaaucuucgcuuuuugcuccuggggaagcugagccaugaucgcccgggcacucuggccagcuaucagcugaucgucuucugucuggacgcucguccugcuucugacaucaaaaucuucugucucaaagucagagucauccaacuccucagggguccuuaucaucagcacugcuuuccugaugucccggaugccaucauauaccaggcgggaagcaucgauaaacucauucucauccaugggcugggcaggguccgagcugagggcuuccacggcugcuucuacuugcucaguaaaacguggcaugacuguguuggagagcagcuuaguggcuuccagaaccuucucuguguagacuccuggcucauaguuguccaucucugaggugacuacgugaaugacccgggcugcccggccucgaauugcaccagcugugcgguccaggccauccacauccuucucuuggagagcaaugacacauuuguucacaucuuccaaaaugugauucucugagacagccaagaagucaucaauggaaguaaugucaucgacagcaucugugagaacacggacuuguuuuucccauuguucuuuaaaaagauccauguucucuugggccaguuuacucugugguuuugcugcuaaagccagugcagcauuaauaaccugaggacagagggcuucuaacuggcuugcagacauucgaacaagcuuuacaccuucuucauuauuugagauggaacaggccaaguuggcaaccucaaucaauuuguuggcauguucacggaaaacuugggcauacuccuuaacuucuuucucauuuccauucuuugcagcuucaaucaauaccaaaaguggaacauugguuuccaggaaagaaucugaaacgugguccaugacagcuuugcggagcugucuacgcaagucccuggucuucuuggucauuuuaucuauugcagaauugagugcaucacuucuuucuuuacguccagccuuagggaaagggagagggaaaaggagagguaccucucucccagcgagcgggacgcggagacucccacaaucccccgcagcaacggcgcuggcgagaagcggcggcagcggcugcagcccaagaacaaacccacucucgcgagagagcucgcccccaccccc

SEQ ID NO: 2106 - RNA, 3644 nt, Homo sapiens
ugucgugguuucauaguggacuuuauugggaaaaguuaguuaguguaaaaaacauucaaauuaauucauaaaauuuaaauaaggugauaguaaauuauaccuuguaguuaauaguaaucaaucaaucaaucacuacaguaaucacaaauaagguaaagucuaaauuacugccuuagcaaacacuauguugucagguuuuucugcugcaagcccaaggcgggaaacacugcaguuauuagaagugagcccaaugaugaauuugcauuugaagcugggagaaagaggaaaaaaaguguguucugauuauggcaucgagacacuguagccuaaaaaagcaacuuuauuaauguccugcagcagcguacauuaguaauuauaacaaugcauuaaaauuuucauuucaugucauagagaaucaguuuucuucaugauacauuauguuuuacugagugaguuugucccuccagagaccuuucugggaacaugccuucuccagggacugcuuccuaagaugcccagguugcuuaccacaggucaucuuuggucauuuaaaagcagucaagcugucuggacugcacccucucaacugaaguugagccaaauucccuucucucaaacccuaacgccgccaucacuaagagaaugggcaucucggcuuggucagagcauuacuaacaagcuaaugugggauucucuuugguuaugaauuuuuauuuuuauuuaagcauacaaaaaauacagcuagaaguaggcuccugcauucuaaaagcauuuuuaaucaacuuaaacuauguucuuggaaaauucaccaccuggacugguucagucugcccauuucccuguggaaucuaguaucaguguuguauuuagcaaauucauuugagugacgaacagugacugauauucaggagccccgaggggugggggcggccggccugggcagacuuagaugcuguccauagcuuugaacucgcugagggccugcaccggguucacgugcuucuucugagaugcccguuuaaucuuggucugugucucauccuguuucucucucuucaccaauggcuuuuucucuggugccuucaucuuccaugacacagcaggaagguugagggaagccauacccugugacuuuugguauuugguagaggcgacguaggaugccuucacugucugcaccacagcauucaucaaguucuuggcugccuggaucagggacauggcgcuguccaccccagagacaacaagcuccccgccgagauucugcaccucggccuugaccuugcugcagauguucagcugguggcaguagagggcgaugcguugcagguaggccagcagguccugcuugcaagccgagucggggcaauggucugcaauggugcggccaagcuuguccauccuggauccugccucagcaauuuucuuggcagcacugaugacauccgauguauuuuugagugguccuuuaccucggguaaagucugucaucuccaucauaaucaugcacaucugcuuggccagcacaaugaugucauugccacugucgucccauuuggacacuucagcauccagcuugcucuuuucuuccuggaagcuggccaccuguuccgcaaucuucgcuuuuugcuccuggggaagcugagccaugaucgcccgggcacucuggccagcuaucagcugaucgucuucugucuggacgcucguccugcuucugacaucaaaaucuucugucucaaagucagagucauccaacuccucagggguccuuaucaucagcacugcuuuccugaugucccggaugccaucauauaccaggcgggaagcaucgauaaacucauucucauccaugggcugggcaggguccgagcugagggcuuccacggcugcuucuacuugcucaguaaaacguggcaugacuguguuggagagcagcuuaguggcuuccagaaccuucucuguguagacuccuggcucauaguuguccaucucugaggugacuacgugaaugacccgggcugcccggccucgaauugcaccagcugugcgguccaggccauccacauccuucucuuggagagcaaugacacauuuguucacaucuuccaaaaugugauucucugagacagccaagaagucaucaauggaaguaaugucaucgacagcaucugugagaacacggacuuguuuuucccauuguucuuuaaaaagauccauguucucuugggccaguuuacucugugguuuugcugcuaaagccagugcagcauuaauaaccugaggacagagggcuucuaacuggcuugcagacauucgaacaagcuuuacaccuucuucauuauuugagauggaacaggccaaguuggcaaccucaaucaauuuguuggcauguucacggaaaacuugggcauacuccuuaacuucuuucucauuuccauucuuugcagcuucaaucaauaccaaaaguggaacauugguuuccaggaaagaaucugaaacgugguccaugacagcuuugcggagcugucuacgcaagucccuggucuucuuggucauuuuaucuauugcagaauugagugcaucacuucuuucuuuacguccagcauugcccauguacuccgaaagcagguccugcagggccuggcggacagcauuacacucugccacaauucgcucacgacggucaucacgcgugcaggacgagucggccaucaaggcagccccacuaaugaugcuuuccagacgcuccuccagggaaggccuaaagcgcuccucgcugaagcucaagggguccacaaugauuuguuugucaaaguuauugagugcauaugccaguucuccuccuccuccacccuggugcugugaggcaucgucugaggcaguggccugggcugcauuggaaaugccugugaccgccugcugcagcugcuuguauaucaggucccuguuggccuuauaggcugcgacaucagggugcuguaggcaugccugggaugcaguauagaggaucggaacguucuucugcaggauuccucuagcugcagccaucugaucacgauggccaacaucuuucaauuccuguugucuuuuggcugccauaauguucagcuuauccacuucagguuuuagggcuuuauacuggauuccuaagucuuguucauugccagcauuccucaacuucaagauaccaucuuccacaacuuucagcugaacaaguaauuuguagacaucugccaugucagccaaaaucagcaaccggguaacagcagagagcaaagcucgagcugcccgaaccauguugccucgcuucacagaagagcagggaucaucugcgaacucuccugcagcagccuucaucaaaucaccuccgccgcccuagaaggcugguugcgccgccacugcgcuccuaacauggcggccgccgaucaggcggcucacauacgcaacgcggagggaggcagagcgggagcgagcaagaaaggcgcgccgccggcuccccgcagccccugucgccgucguuguccccucccggcggacacggagaacccccagccacccgaccccgacucuuacccgcuucacgccuaccuuagggaaagggagagggaaaaggagagguaccucucucccagcgagcgggacgc

SEQ ID NO: 2107-2115 - skipped (9 entries)

SEQ ID NO: 2116 - RNA, 2731 nt, Homo sapiens
gugucuaggggagaagauuuuauuucacaaggugaggaacccaggcugguggccgacgcccacacaccaggcuccgggacgcauggggucugcacguggagagggugcuggccgccccagcaggaagcccgacguaggucccagcgugucugucagucaugcugcugcccuguggggcuggagaggcaggacgugcacccagccuguggcuggcggggcaggggaccugcaggucaggccaagcagaguggcuccggcuaugcccccgagccugcaggcuacgccacggucuggcggcugaagagcucgagggugagcgagcugaggaaggcagggaugcuguccuggcgccgcaggugcaccucgaugagcucgcccacggugugugagaacucugucuccaguagcugcaucuuggaacccgaggggcugguggccuugaagaugaggcagucgccugggugcucggcguacagcgaggucagccgguacugguucuccguggugaugucgaucugguagccggugagcguguagcaggccuugcggaacuccuggaucuuggucuggaaaaccuccuugagccgcugguucuucagcucggcacucuccaccugcuucuucagcucugccaccuccuuggacgauggcagacucgcggcggcagccucaaggucggcugggacggugccuccucucuccauggcgcgcaggagcccgcgcagucgcucgcacuccgccugcagcuggcugugguccucgcgcaggcgcugccuggccacacuggugggguucaggcucaugugcagcacuuugguccugcucuggucauagucacccugcagagcucgccgcuccagcugugccuccagcauccucuuuuccuccuccagccgacuccgcucgccuuccagcuccucgaccuucaaccugagcguguccgccuccucccuggagaacaggaagcucuguucggcagagcuggacugagacuucagcaucuucagcuccaucuccagcaugucugcucuuuguuucuggccucccagcuccuccagggccugcgacagcugagccuugaucuguuccuggcucaggagugugggaggccggggccgccacagcagcuggcagaagcgguccuuguuguucuucugcaggaggcgucccuggaaaguccacagccaguacgcguuguccaccuuauggcuccaccaggacacagaggugacgacguagcgcccaguaggaucccauucgacgucggaagccauguagugcucugcgauguucaugaccgugcaguccgaaguguccacaaacgcuaaggcaccguucauacuccucaggcccgccaacaccacgaacuguccuugggggcuccagaagaugguguucgccugcugcuugucgaacaucuugaugaguucaaucuucccguuguuuuugacgugguagaaagacacagauauccgcggagccucuccgugcagcacagcaaacuuacuuccauuugguucccaggcaaaggcuaugaugguuucuuucaucucgaccacauccacagguaccuguuucucccucauucggaaaauuucaaaauuugugacaacacccugggugccuuucggaguccuaucuacuuucacacacaaguagucuccguucuucugccaauggagcuugcaguccaccacauugaacagguuccucacucggaucucuugccugguagggagcugcaucaggguuacccuggcuggaauaucuuugucuucaggcacccagaaggcgauuauguuaccaccaggagaccaagaaaagucuuuuaucccagagaucuucaaacucuucuuguccaaaagacccauagaaggaguuucauagaugcuaagcguauccagggucauucuggcaaagaauuugccaucauggcuccacuuaaaaauaggccaaugggcugagcucucacagugaaaaccccucuucuugugccccguaaggaugucccagaugauuauggccugagggucauccugcguguccaucagggggcuaaaggucaccagguaccuuucacaaggugagaagucaauaagcugaaccccuugguggcugaaucucugaauuugcuugaauuucucucccccccauagagcaaugccucuuugaugaaagguagccagguaggugcccuuaggagaccaacgcacauacgucucuguccaucucgcucuuucuucaauugagacagggucuuuuacgucauuccagaauauggaagugcggucuccacucucaaaaaucacacuguacugaucucugcauucugccucuucaagccaguaacguaaguuccccaggucuuugaaaggcuguuucucuggaauaucccacucgucacugaucgucauauacuugucaaaauccguaaagagguugacccggaaugugugcugcuugucaagcuuguagccgucggcguucuucacagcauccacagcgugggcaggggacgcguacuccaggaaaauauacccuuuugucuucccauccucuucaggauaaaaaucauuugugauuuucccaaacuuggaaaagaucuuguggaugacauuuuugaguuucucaagucggucgggucccaccugagggacauuguccacuacaaucaccgaaucgauuccaucugcuuccuggggccgaucuuugaguacaucucccaguaauu

SEQ ID NO: 2117 - RNA, 2379 nt, Homo sapiens
gguggaggagaggaggcggagggcugaccuuuugaucuugauaauccuauagcuuuccgcacagcuuguggcugagugcggcuuccuugaagaugaggcagucgccugggugcucggcguacagcgaggucagccgguacugguucuccguggugaugucgaucugguagccggugagcguguagcaggccuugcggaacuccuggaucuuggucuggaaaaccuccuugagccgcugguucuucagcucggcacucuccaccugcuucuucagcucugccaccuccuuggacgauggcagacucgcggcggcagccucaaggucggcugggacggugccuccucucuccauggcgcgcaggagcccgcgcagucgcucgcacuccgccugcagcuggcugugguccucgcgcaggcgcugccuggccacacuggugggguucaggcucaugugcagcacuuugguccugcucuggucauagucacccugcagagcucgccgcuccagcugugccuccagcauccucuuuuccuccuccagccgacuccgcucgccuuccagcuccucgaccuucaaccugagcguguccgccuccucccuggagaacaggaagcucuguucggcagagcuggacugagacuucagcaucuucagcuccaucuccagcaugucugcucuuuguuucuggccucccagcuccuccagggccugcgacagcugagccuugaucuguuccuggcucaggagugugggaggccggggccgccacagcagcuggcagaagcgguccuuguuguucuucugcaggaggcgucccuggaaaguccacagccaguacgcguuguccaccuuauggcuccaccaggacacagaggugacgacguagcgcccaguaggaucccauucgacgucggaagccauguagugcucugcgauguucaugaccgugcaguccgaaguguccacaaacgcuaaggcaccguucauacuccucaggcccgccaacaccacgaacuguccuugggggcuccagaagaugguguucgccugcugcuugucgaacaucuugaugaguucaaucuucccguuguuuuugacgugguagaaagacacagauauccgcggagccucuccgugcagcacagcaaacuuacuuccauuugguucccaggcaaaggcuaugaugguuucuuucaucucgaccacauccacagguaccuguuucucccucauucggaaaauuucaaaauuugugacaacacccugggugccuuucggaguccuaucuacuuucacacacaaguagucuccguucuucugccaauggagcuugcaguccaccacauugaacagguuccucacucggaucucuugccugguagggagcugcaucaggguuacccuggcuggaauaucuuugucuucaggcacccagaaggcgauuauguuaccaccaggagaccaagaaaagucuuuuaucccagagaucuucaaacucuucuuguccaaaagacccauagaaggaguuucauagaugcuaagcguauccagggucauucuggcaaagaauuugccaucauggcuccacuuaaaaauaggccaaugggcugagcucucacagugaaaaccccucuucuugugccccguaaggaugucccagaugauuauggccugagggucauccugcguguccaucagggggcuaaaggucaccagguaccuuucacaaggugagaagucaauaagcugaaccccuugguggcugaaucucugaauuugcuugaauuucucucccccccauagagcaaugccucuuugaugaaagguagccagguaggugcccuuaggagaccaacgcacauacgucucuguccaucucgcucuuucuucaauugagacagggucuuuuacgucauuccagaauauggaagugcggucuccacucucaaaaaucacacuguacugaucucugcauucugccucuucaagccaguaacguaaguuccccaggucuuugaaaggcuguuucucuggaauaucccacucgucacugaucgucauauacuugucaaaauccguaaagagguugacccggaaugugugcugcuugucaagcuuguagccgucggcguucuucacagcauccacagcgugggcaggggacgcguacuccaggaaaauauacccuuuugucuucccauccucuucaggauaaaaaucauuugugauuuucccaaacuuggaaaagaucuuguggaugacauuuuugaguuucucaagucggucgggucccaccugagggacauuguccacuacaaucaccgaaucgauuccaucugcuuccuggggccgaucuuugaguacaucucccaguaauu

SEQ ID NO: 2118 - skipped

SEQ ID NO: 2119 - RNA, 2142 nt, Homo sapiens
gguggaggagaggaggcggagggcugaccuuuugaucuugauaauccuauagcuuuccgcacagcuuguggcugagugcggcuuccuugaagaugaggcagucgccugggugcucggcguacagcgaggucagccgguacugguucuccguggugaugucgaucugguagccggugagcguguagcaggccuugcggaacuccuggaucuuggucuggaaaaccuccuugagccgcugguucuucagcucggcacucuccaccugcuucuucagcucugccaccuccuuggacgauggcagacucgcggcggcagccucaaggucggcugggacggugccuccucucuccauggcgcgcaggagcccgcgcagucgcucgcacuccgccugcagcuggcugugguccucgcgcaggcgcugccuggccacacuggugggguucaggcucaugugcagcacuuugguccugcucuggucauagucacccuugaucuguuccuggcucaggagugugggaggccggggccgccacagcagcuggcagaagcgguccuuguuguucuucugcaggaggcgucccuggaaaguccacagccaguacgcguuguccaccuuauggcuccaccaggacacagaggugacgacguagcgcccaguaggaucccauucgacgucggaagccauguagugcucugcgauguucaugaccgugcaguccgaaguguccacaaacgcuaaggcaccguucauacuccucaggcccgccaacaccacgaacuguccuugggggcuccagaagaugguguucgccugcugcuugucgaacaucuugaugaguucaaucuucccguuguuuuugacgugguagaaagacacagauauccgcggagccucuccgugcagcacagcaaacuuacuuccauuugguucccaggcaaaggcuaugaugguuucuuucaucucgaccacauccacagguaccuguuucucccucauucggaaaauuucaaaauuugugacaacacccugggugccuuucggaguccuaucuacuuucacacacaaguagucuccguucuucugccaauggagcuugcaguccaccacauugaacagguuccucacucggaucucuugccugguagggagcugcaucaggguuacccuggcuggaauaucuuugucuucaggcacccagaaggcgauuauguuaccaccaggagaccaagaaaagucuuuuaucccagagaucuucaaacucuucuuguccaaaagacccauagaaggaguuucauagaugcuaagcguauccagggucauucuggcaaagaauuugccaucauggcuccacuuaaaaauaggccaaugggcugagcucucacagugaaaaccccucuucuugugccccguaaggaugucccagaugauuauggccugagggucauccugcguguccaucagggggcuaaaggucaccagguaccuuucacaaggugagaagucaauaagcugaaccccuugguggcugaaucucugaauuugcuugaauuucucucccccccauagagcaaugccucuuugaugaaagguagccagguaggugcccuuaggagaccaacgcacauacgucucuguccaucucgcucuuucuucaauugagacagggucuuuuacgucauuccagaauauggaagugcggucuccacucucaaaaaucacacuguacugaucucugcauucugccucuucaagccaguaacguaaguuccccaggucuuugaaaggcuguuucucuggaauaucccacucgucacugaucgucauauacuugucaaaauccguaaagagguugacccggaaugugugcugcuugucaagcuuguagccgucggcguucuucacagcauccacagcgugggcaggggacgcguacuccaggaaaauauacccuuuugucuucccauccucuucaggauaaaaaucauuugugauuuucccaaacuuggaaaagaucuuguggaugacauuuuugaguuucucaagucggucgggucccaccugagggacauuguccacuacaaucaccgaaucgauuccaucugcuuccuggggccgaucuuugaguacaucucccaguaauu

SEQ ID NO: 2120 - skipped

SEQ ID NO: 2121 - RNA, 3387 nt, Homo sapiens
ugcuggcucgcaggacgcgaguguagagaugcggcuggcucuccuuuccucuucuagucugucuaccuugcccugugcuggcuucugggacugcgcugucccacugcgcagccuggcaucuuggaaggcguccccugccccggccccacacggacuucaguccuccccaggcaccacugccucuggacacacugacacacacgccuacggccgcagcccucauggaacgaagcccaaguugcgacagacagaggcugagaaagucagggggacagccuagggucuucugcacccaggagguccagggcugcaaagccacauaggguuggcccaaggcugagaagccucagggggugacgaggacgggccagugcaccuccuucccgcccagcccuccacaccauccccuuuggacgcgaggcugcuccuuugcugagggcuacggucggaucuccccacaggaggagacagagagcgagacagccggagagccgucacacgcaggacccaccuugaagaugaggcagucgccugggugcucggcguacagcgaggucagccgguacugguucuccguggugaugucgaucugguagccggugagcguguagcaggccuugcggaacuccuggaucuuggucuggaaaaccuccuugagccgcugguucuucagcucggcacucuccaccugcuucuucagcucugccaccuccuuggacgauggcagacucgcggcggcagccucaaggucggcugggacggugccuccucucuccauggcgcgcaggagcccgcgcagucgcucgcacuccgccugcagcuggcugugguccucgcgcaggcgcugccuggccacacuggugggguucaggcucaugugcagcacuuugguccugcucuggucauagucacccugcagagcucgccgcuccagcugugccuccagcauccucuuuuccuccuccagccgacuccgcucgccuuccagcuccucgaccuucaaccugagcguguccgccuccucccuggagaacaggaagcucuguucggcagagcuggacugagacuucagcaucuucagcuccaucuccagcaugucugcucuuuguuucuggccucccagcuccuccagggccugcgacagcugagccuugaucuguuccuggcucaggagugugggaggccggggccgccacagcagcuggcagaagcgguccuuguuguucuucugcaggaggcgucccuggaaaguccacagccaguacgcguuguccaccuuauggcuccaccaggacacagaggugacgacguagcgcccaguaggaucccauucgacgucggaagccauguagugcucugcgauguucaugaccgugcaguccgaaguguccacaaacgcuaaggcaccguucauacuccucaggcccgccaacaccacgaacuguccuugggggcuccagaagaugguguucgccugcugcuugucgaacaucuugaugaguucaaucuucccguuguuuuugacgugguagaaagacacagauauccgcggagccucuccgugcagcacagcaaacuuacuuccauuugguucccaggcaaaggcuaugaugguuucuuucaucucgaccacauccacagguaccuguuucucccucauucggaaaauuucaaaauuugugacaacacccugggugccuuucggaguccuaucuacuuucacacacaaguagucuccguucuucugccaauggagcuugcaguccaccacauugaacagguuccucacucggaucucuugccugguagggagcugcaucaggguuacccuggcuggaauaucuuugucuucaggcacccagaaggcgauuauguuaccaccaggagaccaagaaaagucuuuuaucccagagaucuucaaacucuucuuguccaaaagacccauagaaggaguuucauagaugcuaagcguauccagggucauucuggcaaagaauuugccaucauggcuccacuuaaaaauaggccaaugggcugagcucucacagugaaaaccccucuucuugugccccguaaggaugucccagaugauuauggccugagggucauccugcguguccaucagggggcuaaaggucaccagguaccuuucacaaggugagaagucaauaagcugaaccccuugguggcugaaucucugaauuugcuugaauuucucucccccccauagagcaaugccucuuugaugaaagguagccagguaggugcccuuaggagaccaacgcacauacgucucuguccaucucgcucuuucuucaauugagacagggucuuuuacgucauuccagaauauggaagugcggucuccacucucaaaaaucacacuguacugaucucugcauucugccucuucaagccaguaacguaaguuccccaggucuuugaaaggcuguuucucuggaauaucccacucgucacugaucgucauauacuugucaaaauccguaaagagguugacccggaaugugugcugcuugucaagcuuguagccgucggcguucuucacagcauccacagcgugggcaggggacgcguacuccaggaaaauauacccuuuugucuucccauccucuucaggauaaaaaucauuugugauuuucccaaacuuggaaaagaucuuguggaugacauuuuugaguuucucaagucggucgggucccaccugagggacauuguccacuacaaucaccgaaucgauuccaucugcuuccuggggccgaucuuugaguacaucucccaguaauucuuccucgcucacgucguccacgaaguccucggggucgcugaaggagggcucguccgcgucgccguucuccagcgcccgggguucggccucggccgcucugcccucguuuccucccgcguccucggacaccgccugggcccggcugucggagcgcucgucccgagccugcucuccuggggccucgcccugugccgggacagggggcucagcaugcgacccgggcagcuccucggcggccggcggcgagggcgacucggacgggccggaggccgccucugccucggccgccggcucgguccucaccucggacuccggcccggccuccgcgauccccaccuccucacuggaggccucgguccccgcggccuccggagcgccgggccccgcgggccgcagcagccccucggcuggcggcggcucggcggccggcugcugcuggccgggcucggcgcgcuccucggccgccucgggcaccgccacguucuccgcguccugcaugggcccaacgcugccuacucgcagggcuccgcggccgccgcgcuuccgacucucccaggccgcaccgcgcgccgcgacggcua

SEQ ID NO: 2122 - RNA, 3313 nt, Homo sapiens
gugucuaggggagaagauuuuauuucacaaggugaggaacccaggcugguggccgacgcccacacaccaggcuccgggacgcauggggucugcacguggagagggugcuggccgccccagcaggaagcccgacguaggucccagcgugucugucagucaugcugcugcccuguggggcuggagaggcaggacgugcacccagccuguggcuggcggggcaggggaccugcaggucaggccaagcagaguggcuccggcuaugcccccgagccugcaggcuacgccacggucuggcggcugaagagcucgagggugagcgagcugaggaaggcagggaugcuguccuggcgccgcaggugcaccucgaugagcucgcccacggugugugagaacucugucuccaguagcugcaucuuggaacccgaggggcugguggccuugaagaugaggcagucgccugggugcucggcguacagcgaggucagccgguacugguucuccguggugaugucgaucugguagccggugagcguguagcaggccuugcggaacuccuggaucuuggucuggaaaaccuccuugagccgcugguucuucagcucggcacucuccaccugcuucuucagcucugccaccuccuuggacgauggcagacucgcggcggcagccucaaggucggcugggacggugccuccucucuccauggcgcgcaggagcccgcgcagucgcucgcacuccgccugcagcuggcugugguccucgcgcaggcgcugccuggccacacuggugggguucaggcucaugugcagcacuuugguccugcucuggucauagucacccugcagagcucgccgcuccagcugugccuccagcauccucuuuuccuccuccagccgacuccgcucgccuuccagcuccucgaccuucaaccugagcguguccgccuccucccuggagaacaggaagcucuguucggcagagcuggacugagacuucagcaucuucagcuccaucuccagcaugucugcucuuuguuucuggccucccagcuccuccagggccugcgacagcugagccuugaucuguuccuggcucaggagugugggaggccggggccgccacagcagcuggcagaagcgguccuuguuguucuucugcaggaggcgucccuggaaaguccacagccaguacgcguuguccaccuuauggcuccaccaggacacagaggugacgacguagcgcccaguaggaucccauucgacgucggaagccauguagugcucugcgauguucaugaccgugcaguccgaaguguccacaaacgcuaaggcaccguucauacuccucaggcccgccaacaccacgaacuguccuugggggcuccagaagaugguguucgccugcugcuugucgaacaucuugaugaguucaaucuucccguuguuuuugacgugguagaaagacacagauauccgcggagccucuccgugcagcacagcaaacuuacuuccauuugguucccaggcaaaggcuaugaugguuucuuucaucucgaccacauccacagguaccuguuucucccucauucggaaaauuucaaaauuugugacaacacccugggugccuuucggaguccuaucuacuuucacacacaaguagucuccguucuucugccaauggagcuugcaguccaccacauugaacagguuccucacucggaucucuugccugguagggagcugcaucaggguuacccuggcuggaauaucuuugucuucaggcacccagaaggcgauuauguuaccaccaggagaccaagaaaagucuuuuaucccagagaucuucaaacucuucuuguccaaaagacccauagaaggaguuucauagaugcuaagcguauccagggucauucuggcaaagaauuugccaucauggcuccacuuaaaaauaggccaaugggcugagcucucacagugaaaaccccucuucuugugccccguaaggaugucccagaugauuauggccugagggucauccugcguguccaucagggggcuaaaggucaccagguaccuuucacaaggugagaagucaauaagcugaaccccuugguggcugaaucucugaauuugcuugaauuucucucccccccauagagcaaugccucuuugaugaaagguagccagguaggugcccuuaggagaccaacgcacauacgucucuguccaucucgcucuuucuucaauugagacagggucuuuuacgucauuccagaauauggaagugcggucuccacucucaaaaaucacacuguacugaucucugcauucugccucuucaagccaguaacguaaguuccccaggucuuugaaaggcuguuucucuggaauaucccacucgucacugaucgucauauacuugucaaaauccguaaagagguugacccggaaugugugcugcuugucaagcuuguagccgucggcguucuucacagcauccacagcgugggcaggggacgcguacuccaggaaaauauacccuuuugucuucccauccucuucaggauaaaaaucauuugugauuuucccaaacuuggaaaagaucuuguggaugacauuuuugaguuucucaagucggucgggucccaccugagggacauuguccacuacaaucaccgaaucgauuccaucugcuuccuggggccgaucuuugaguacaucucccaguaauucuuccucgcucacgucguccacgaaguccucggggucgcugaaggagggcucguccgcgucgccguucuccagcgcccgggguucggccucggccgcucugcccucguuuccucccgcguccucggacaccgccugggcccggcugucggagcgcucgucccgagccugcucuccuggggccucgcccugugccgggacagggggcucagcaugcgacccgggcagcuccucggcggccggcggcgagggcgacucggacgggccggaggccgccucugccucggccgccggcucgguccucaccucggacuccggcccggccuccgcgauccccaccuccucacuggaggccucgguccccgcggccuccggagcgccgggccccgcgggccgcagcagccccucggcuggcggcggcucggcggccggcugcugcuggccgggcucggcgcgcuccucggccgccucgggcaccgccacguucuccgcguccugcaugggcccaacgcugccuacucgcagggcuccgcggccgccgcgcuuccgacucucccaggccgcaccgcgcgccgcgacggcua

SEQ ID NO: 2123 - RNA, 2961 nt, Homo sapiens
gguggaggagaggaggcggagggcugaccuuuugaucuugauaauccuauagcuuuccgcacagcuuguggcugagugcggcuuccuugaagaugaggcagucgccugggugcucggcguacagcgaggucagccgguacugguucuccguggugaugucgaucugguagccggugagcguguagcaggccuugcggaacuccuggaucuuggucuggaaaaccuccuugagccgcugguucuucagcucggcacucuccaccugcuucuucagcucugccaccuccuuggacgauggcagacucgcggcggcagccucaaggucggcugggacggugccuccucucuccauggcgcgcaggagcccgcgcagucgcucgcacuccgccugcagcuggcugugguccucgcgcaggcgcugccuggccacacuggugggguucaggcucaugugcagcacuuugguccugcucuggucauagucacccugcagagcucgccgcuccagcugugccuccagcauccucuuuuccuccuccagccgacuccgcucgccuuccagcuccucgaccuucaaccugagcguguccgccuccucccuggagaacaggaagcucuguucggcagagcuggacugagacuucagcaucuucagcuccaucuccagcaugucugcucuuuguuucuggccucccagcuccuccagggccugcgacagcugagccuugaucuguuccuggcucaggagugugggaggccggggccgccacagcagcuggcagaagcgguccuuguuguucuucugcaggaggcgucccuggaaaguccacagccaguacgcguuguccaccuuauggcuccaccaggacacagaggugacgacguagcgcccaguaggaucccauucgacgucggaagccauguagugcucugcgauguucaugaccgugcaguccgaaguguccacaaacgcuaaggcaccguucauacuccucaggcccgccaacaccacgaacuguccuugggggcuccagaagaugguguucgccugcugcuugucgaacaucuugaugaguucaaucuucccguuguuuuugacgugguagaaagacacagauauccgcggagccucuccgugcagcacagcaaacuuacuuccauuugguucccaggcaaaggcuaugaugguuucuuucaucucgaccacauccacagguaccuguuucucccucauucggaaaauuucaaaauuugugacaacacccugggugccuuucggaguccuaucuacuuucacacacaaguagucuccguucuucugccaauggagcuugcaguccaccacauugaacagguuccucacucggaucucuugccugguagggagcugcaucaggguuacccuggcuggaauaucuuugucuucaggcacccagaaggcgauuauguuaccaccaggagaccaagaaaagucuuuuaucccagagaucuucaaacucuucuuguccaaaagacccauagaaggaguuucauagaugcuaagcguauccagggucauucuggcaaagaauuugccaucauggcuccacuuaaaaauaggccaaugggcugagcucucacagugaaaaccccucuucuugugccccguaaggaugucccagaugauuauggccugagggucauccugcguguccaucagggggcuaaaggucaccagguaccuuucacaaggugagaagucaauaagcugaaccccuugguggcugaaucucugaauuugcuugaauuucucucccccccauagagcaaugccucuuugaugaaagguagccagguaggugcccuuaggagaccaacgcacauacgucucuguccaucucgcucuuucuucaauugagacagggucuuuuacgucauuccagaauauggaagugcggucuccacucucaaaaaucacacuguacugaucucugcauucugccucuucaagccaguaacguaaguuccccaggucuuugaaaggcuguuucucuggaauaucccacucgucacugaucgucauauacuugucaaaauccguaaagagguugacccggaaugugugcugcuugucaagcuuguagccgucggcguucuucacagcauccacagcgugggcaggggacgcguacuccaggaaaauauacccuuuugucuucccauccucuucaggauaaaaaucauuugugauuuucccaaacuuggaaaagaucuuguggaugacauuuuugaguuucucaagucggucgggucccaccugagggacauuguccacuacaaucaccgaaucgauuccaucugcuuccuggggccgaucuuugaguacaucucccaguaauucuuccucgcucacgucguccacgaaguccucggggucgcugaaggagggcucguccgcgucgccguucuccagcgcccgggguucggccucggccgcucugcccucguuuccucccgcguccucggacaccgccugggcccggcugucggagcgcucgucccgagccugcucuccuggggccucgcccugugccgggacagggggcucagcaugcgacccgggcagcuccucggcggccggcggcgagggcgacucggacgggccggaggccgccucugccucggccgccggcucgguccucaccucggacuccggcccggccuccgcgauccccaccuccucacuggaggccucgguccccgcggccuccggagcgccgggccccgcgggccgcagcagccccucggcuggcggcggcucggcggccggcugcugcuggccgggcucggcgcgcuccucggccgccucgggcaccgccacguucuccgcguccugcaugggcccaacgcugccuacucgcagggcuccgcggccgccgcgcuuccgacucucccaggccgcaccgcgcgccgcgacggcua

SEQ ID NO: 2124 - RNA, 2724 nt, Homo sapiens
gguggaggagaggaggcggagggcugaccuuuugaucuugauaauccuauagcuuuccgcacagcuuguggcugagugcggcuuccuugaagaugaggcagucgccugggugcucggcguacagcgaggucagccgguacugguucuccguggugaugucgaucugguagccggugagcguguagcaggccuugcggaacuccuggaucuuggucuggaaaaccuccuugagccgcugguucuucagcucggcacucuccaccugcuucuucagcucugccaccuccuuggacgauggcagacucgcggcggcagccucaaggucggcugggacggugccuccucucuccauggcgcgcaggagcccgcgcagucgcucgcacuccgccugcagcuggcugugguccucgcgcaggcgcugccuggccacacuggugggguucaggcucaugugcagcacuuugguccugcucuggucauagucacccuugaucuguuccuggcucaggagugugggaggccggggccgccacagcagcuggcagaagcgguccuuguuguucuucugcaggaggcgucccuggaaaguccacagccaguacgcguuguccaccuuauggcuccaccaggacacagaggugacgacguagcgcccaguaggaucccauucgacgucggaagccauguagugcucugcgauguucaugaccgugcaguccgaaguguccacaaacgcuaaggcaccguucauacuccucaggcccgccaacaccacgaacuguccuugggggcuccagaagaugguguucgccugcugcuugucgaacaucuugaugaguucaaucuucccguuguuuuugacgugguagaaagacacagauauccgcggagccucuccgugcagcacagcaaacuuacuuccauuugguucccaggcaaaggcuaugaugguuucuuucaucucgaccacauccacagguaccuguuucucccucauucggaaaauuucaaaauuugugacaacacccugggugccuuucggaguccuaucuacuuucacacacaaguagucuccguucuucugccaauggagcuugcaguccaccacauugaacagguuccucacucggaucucuugccugguagggagcugcaucaggguuacccuggcuggaauaucuuugucuucaggcacccagaaggcgauuauguuaccaccaggagaccaagaaaagucuuuuaucccagagaucuucaaacucuucuuguccaaaagacccauagaaggaguuucauagaugcuaagcguauccagggucauucuggcaaagaauuugccaucauggcuccacuuaaaaauaggccaaugggcugagcucucacagugaaaaccccucuucuugugccccguaaggaugucccagaugauuauggccugagggucauccugcguguccaucagggggcuaaaggucaccagguaccuuucacaaggugagaagucaauaagcugaaccccuugguggcugaaucucugaauuugcuugaauuucucucccccccauagagcaaugccucuuugaugaaagguagccagguaggugcccuuaggagaccaacgcacauacgucucuguccaucucgcucuuucuucaauugagacagggucuuuuacgucauuccagaauauggaagugcggucuccacucucaaaaaucacacuguacugaucucugcauucugccucuucaagccaguaacguaaguuccccaggucuuugaaaggcuguuucucuggaauaucccacucgucacugaucgucauauacuugucaaaauccguaaagagguugacccggaaugugugcugcuugucaagcuuguagccgucggcguucuucacagcauccacagcgugggcaggggacgcguacuccaggaaaauauacccuuuugucuucccauccucuucaggauaaaaaucauuugugauuuucccaaacuuggaaaagaucuuguggaugacauuuuugaguuucucaagucggucgggucccaccugagggacauuguccacuacaaucaccgaaucgauuccaucugcuuccuggggccgaucuuugaguacaucucccaguaauucuuccucgcucacgucguccacgaaguccucggggucgcugaaggagggcucguccgcgucgccguucuccagcgcccgggguucggccucggccgcucugcccucguuuccucccgcguccucggacaccgccugggcccggcugucggagcgcucgucccgagccugcucuccuggggccucgcccugugccgggacagggggcucagcaugcgacccgggcagcuccucggcggccggcggcgagggcgacucggacgggccggaggccgccucugccucggccgccggcucgguccucaccucggacuccggcccggccuccgcgauccccaccuccucacuggaggccucgguccccgcggccuccggagcgccgggccccgcgggccgcagcagccccucggcuggcggcggcucggcggccggcugcugcuggccgggcucggcgcgcuccucggccgccucgggcaccgccacguucuccgcguccugcaugggcccaacgcugccuacucgcagggcuccgcggccgccgcgcuuccgacucucccaggccgcaccgcgcgccgcgacggcua

SEQ ID NO: 2125 - RNA, 1940 nt, Homo sapiens
gugucuaggggagaagauuuuauuucacaaggugaggaacccaggcugguggccgacgcccacacaccaggcuccgggacgcauggggucugcacguggagagggugcuggccgccccagcaggaagcccgacguaggucccagcgugucugucagucaugcugcugcccuguggggcuggagaggcaggacgugcacccagccuguggcuggcggggcaggggaccugcaggucaggccaagcagaguggcuccggcuaugcccccgagccugcaggcuacgccacggucuggcggcugaagagcucgagggugagcgagcugaggaaggcagggaugcuguccuggcgccgcaggugcaccucgaugagcucgcccacggugugugagaacucugucuccaguagcugcaucuuggaacccgaggggcugguggccuugaagaugaggcagucgccugggugcucggcguacagcgaggucagccgguacugguucuccguggugaugucgaucugguagccggugagcguguagcaggccuugcggaacuccuggaucuuggucuggaaaaccuccuugagccgcugguucuucagcucggcacucuccaccugcuucuucagcucugccaccuccuuggacgauggcagacucgcggcggcagccucaaggucggcugggacggugccuccucucuccauggcgcgcaggagcccgcgcagucgcucgcacuccgccugcagcuggcugugguccucgcgcaggcgcugccuggccacacuggugggguucaggcucaugugcagcacuuugguccugcucuggucauagucacccuugaucuguuccuggcucaggagugugggaggccggggccgccacagcagcuggcagaagcgguccuuguuguucuucugcaggaggcgucccuggaaaguccacagccaguacgcguuguccaccuaggccagggcagggacacaccaggacacagaggggucagagagccacaaccgugacuaugucacuugcugaacaagguccuggguaucggggacacgugugaagcaaacaaagcucugccugugcugagcugacagcaggguaggugggcagucaaugcaagacaccuccauuaugcaaccgacccggagugcggggcacggagcagcuggagcagcgcucaucacagcacaggccugcacauucuggcuggcaauaagaaccccaugcuggauguaagcuaacugccucacuacugcgccgcugaaccccgugcuggauuuaaacuggacugaacccugugccaaacguaagcuaacugcauagcacuacucacugcugagcccugggccgggugugagcugugcggagcccugugcuggauguaagcuaacugcaucacuacacgccgccuaguuccgcucuccucauggcaggccucucucaugaaggagggcgccuucacuggcacucagcauaaacuccuuguugcaggccggcauuuuggaagcuaaguguucauaacucaaggagaguggucaacagcuuaaaaagucuuuuuuuuuuuuuuuuuuuuaauggggcuaggguuucgcuauguugcucaggcuagucucaaacuccuggguucaagugauuuuucuaccucugccuccugaagugcugggauuacaggugugagccacugugccuggccuaaagugauuucaagugucaaggcaggccccaccgcagugacaucugaacauaccuggacacaggcugugaucaacauauccugauucgaaugcgaagauuucuaacucuagacacuugcaguaacauuugggaaguugauauuccuacaaauucuguaucucauuaaacaaaauuacccgcguuugguuucacaggcucuauuggcauggacuaguucaaguaucagugccuccauc

SEQ ID NO: 2126 - RNA, 2092 nt, Homo sapiens
gugucuaggggagaagauuuuauuucacaaggugaggaacccaggcugguggccgacgcccacacaccaggcuccgggacgcauggggucugcacguggagagggugcuggccgccccagcaggaagcccgacguaggucccagcgugucugucagucaugcugcugcccuguggggcuggagaggcaggacgugcacccagccuguggcuggcggggcaggggaccugcaggucaggccaagcagaguggcuccggcuaugcccccgagccugcaggcuacgccacggucuggcggcugaagagcucgagggugagcgagcugaggaaggcagggaugcuguccuggcgccgcaggugcaccucgaugagcucgcccacggugugugagaacucugucuccaguagcugcaucuuggaacccgaggggcugguggccuugaucuguuccuggcucaggagugugggaggccggggccgccacagcagcuggcagaagcgguccuuguuguucuucugcaggaggcgucccuggaaaguccacagccaguacgcguuguccaccuuauggcuccaccaggacacagaggugacgacguagcgcccaguaggaucccauucgacgucggaagccauguagugcucugcgauguucaugaccgugcaguccgaaguguccacaaacgcuaaggcaccguucauacuccucaggcccgccaacaccacgaacuguccuugggggcuccagaagaugguguucgccugcugcuugucgaacaucuugaugaguucaaucuucccguuguuuuugacgugguagaaagacacagauauccgcggagccucuccgugcagcacagcaaacuuacuuccauuugguucccaggcaaaggcuaugaugguuucuuucaucucgaccacauccacagguaccuguuucucccucauucggaaaauuucaaaauuugugacaacacccugggugccuuucggaguccuaucuacuuucacacacaaguagucuccguucuucugccaauggagcuugcaguccaccacauugaacagguuccucacucggaucucuugccugguagggagcugcaucaggguuacccuggcuggaauaucuuugucuucaggcacccagaaggcgauuauguuaccaccaggagaccaagaaaagucuuuuaucccagagaucuucaaacucuucuuguccaaaagacccauagaaggaguuucauagaugcuaagcguauccagggucauucuggcaaagaauuugccaucauggcuccacuuaaaaauaggccaaugggcugagcucucacagugaaaaccccucuucuugugccccguaaggaugucccagaugauuauggccugagggucauccugcguguccaucagggggcuaaaggucaccagguaccuuucacaaggugagaagucaauaagcugaaccccuugguggcugaaucucugaauuugcuugaauuucucucccccccauagagcaaugccucuuugaugaaagguagccagguaggugcccuuaggagaccaacgcacauacgucucuguccaucucgcucuuucuucaauugagacagggucuuuuacgucauuccagaauauggaagugcggucuccacucucaaaaaucacacuguacugaucucugcauucugccucuucaagccaguaacguaaguuccccaggucuuugaaaggcuguuucucuggaauaucccacucgucacugaucgucauauacuugucaaaauccguaaagagguugacccggaaugugugcugcuugucaagcuuguagccgucggcguucuucacagcauccacagcgugggcaggggacgcguacuccaggaaaauauacccuuuugucuucccauccucuucaggauaaaaaucauuugugauuuucccaaacuuggaaaagaucuuguggaugacauuuuugaguuucucaagucggucgggucccaccugagggacauuguccacuacaaucaccgaaucgauuccaucugcuuccuggggccgaucuuugaguacaucucccaguaauu

SEQ ID NO: 2127 - RNA, 2674 nt, Homo sapiens
gugucuaggggagaagauuuuauuucacaaggugaggaacccaggcugguggccgacgcccacacaccaggcuccgggacgcauggggucugcacguggagagggugcuggccgccccagcaggaagcccgacguaggucccagcgugucugucagucaugcugcugcccuguggggcuggagaggcaggacgugcacccagccuguggcuggcggggcaggggaccugcaggucaggccaagcagaguggcuccggcuaugcccccgagccugcaggcuacgccacggucuggcggcugaagagcucgagggugagcgagcugaggaaggcagggaugcuguccuggcgccgcaggugcaccucgaugagcucgcccacggugugugagaacucugucuccaguagcugcaucuuggaacccgaggggcugguggccuugaucuguuccuggcucaggagugugggaggccggggccgccacagcagcuggcagaagcgguccuuguuguucuucugcaggaggcgucccuggaaaguccacagccaguacgcguuguccaccuuauggcuccaccaggacacagaggugacgacguagcgcccaguaggaucccauucgacgucggaagccauguagugcucugcgauguucaugaccgugcaguccgaaguguccacaaacgcuaaggcaccguucauacuccucaggcccgccaacaccacgaacuguccuugggggcuccagaagaugguguucgccugcugcuugucgaacaucuugaugaguucaaucuucccguuguuuuugacgugguagaaagacacagauauccgcggagccucuccgugcagcacagcaaacuuacuuccauuugguucccaggcaaaggcuaugaugguuucuuucaucucgaccacauccacagguaccuguuucucccucauucggaaaauuucaaaauuugugacaacacccugggugccuuucggaguccuaucuacuuucacacacaaguagucuccguucuucugccaauggagcuugcaguccaccacauugaacagguuccucacucggaucucuugccugguagggagcugcaucaggguuacccuggcuggaauaucuuugucuucaggcacccagaaggcgauuauguuaccaccaggagaccaagaaaagucuuuuaucccagagaucuucaaacucuucuuguccaaaagacccauagaaggaguuucauagaugcuaagcguauccagggucauucuggcaaagaauuugccaucauggcuccacuuaaaaauaggccaaugggcugagcucucacagugaaaaccccucuucuugugccccguaaggaugucccagaugauuauggccugagggucauccugcguguccaucagggggcuaaaggucaccagguaccuuucacaaggugagaagucaauaagcugaaccccuugguggcugaaucucugaauuugcuugaauuucucucccccccauagagcaaugccucuuugaugaaagguagccagguaggugcccuuaggagaccaacgcacauacgucucuguccaucucgcucuuucuucaauugagacagggucuuuuacgucauuccagaauauggaagugcggucuccacucucaaaaaucacacuguacugaucucugcauucugccucuucaagccaguaacguaaguuccccaggucuuugaaaggcuguuucucuggaauaucccacucgucacugaucgucauauacuugucaaaauccguaaagagguugacccggaaugugugcugcuugucaagcuuguagccgucggcguucuucacagcauccacagcgugggcaggggacgcguacuccaggaaaauauacccuuuugucuucccauccucuucaggauaaaaaucauuugugauuuucccaaacuuggaaaagaucuuguggaugacauuuuugaguuucucaagucggucgggucccaccugagggacauuguccacuacaaucaccgaaucgauuccaucugcuuccuggggccgaucuuugaguacaucucccaguaauucuuccucgcucacgucguccacgaaguccucggggucgcugaaggagggcucguccgcgucgccguucuccagcgcccgggguucggccucggccgcucugcccucguuuccucccgcguccucggacaccgccugggcccggcugucggagcgcucgucccgagccugcucuccuggggccucgcccugugccgggacagggggcucagcaugcgacccgggcagcuccucggcggccggcggcgagggcgacucggacgggccggaggccgccucugccucggccgccggcucgguccucaccucggacuccggcccggccuccgcgauccccaccuccucacuggaggccucgguccccgcggccuccggagcgccgggccccgcgggccgcagcagccccucggcuggcggcggcucggcggccggcugcugcuggccgggcucggcgcgcuccucggccgccucgggcaccgccacguucuccgcguccugcaugggcccaacgcugccuacucgcagggcuccgcggccgccgcgcuuccgacucucccaggccgcaccgcgcgccgcgacggcua

SEQ ID NO: 2128 - RNA, 2494 nt, Homo sapiens
gugucuaggggagaagauuuuauuucacaaggugaggaacccaggcugguggccgacgcccacacaccaggcuccgggacgcauggggucugcacguggagagggugcuggccgccccagcaggaagcccgacguaggucccagcgugucugucagucaugcugcugcccuguggggcuggagaggcaggacgugcacccagccuguggcuggcggggcaggggaccugcaggucaggccaagcagaguggcuccggcuaugcccccgagccugcaggcuacgccacggucuggcggcugaagagcucgagggugagcgagcugaggaaggcagggaugcuguccuggcgccgcaggugcaccucgaugagcucgcccacggugugugagaacucugucuccaguagcugcaucuuggaacccgaggggcugguggccuugaagaugaggcagucgccugggugcucggcguacagcgaggucagccgguacugguucuccguggugaugucgaucugguagccggugagcguguagcaggccuugcggaacuccuggaucuuggucuggaaaaccuccuugagccgcugguucuucagcucggcacucuccaccugcuucuucagcucugccaccuccuuggacgauggcagacucgcggcggcagccucaaggucggcugggacggugccuccucucuccauggcgcgcaggagcccgcgcagucgcucgcacuccgccugcagcuggcugugguccucgcgcaggcgcugccuggccacacuggugggguucaggcucaugugcagcacuuugguccugcucuggucauagucacccuugaucuguuccuggcucaggagugugggaggccggggccgccacagcagcuggcagaagcgguccuuguuguucuucugcaggaggcgucccuggaaaguccacagccaguacgcguuguccaccuuauggcuccaccaggacacagaggugacgacguagcgcccaguaggaucccauucgacgucggaagccauguagugcucugcgauguucaugaccgugcaguccgaaguguccacaaacgcuaaggcaccguucauacuccucaggcccgccaacaccacgaacuguccuugggggcuccagaagaugguguucgccugcugcuugucgaacaucuugaugaguucaaucuucccguuguuuuugacgugguagaaagacacagauauccgcggagccucuccgugcagcacagcaaacuuacuuccauuugguucccaggcaaaggcuaugaugguuucuuucaucucgaccacauccacagguaccuguuucucccucauucggaaaauuucaaaauuugugacaacacccugggugccuuucggaguccuaucuacuuucacacacaaguagucuccguucuucugccaauggagcuugcaguccaccacauugaacagguuccucacucggaucucuugccugguagggagcugcaucaggguuacccuggcuggaauaucuuugucuucaggcacccagaaggcgauuauguuaccaccaggagaccaagaaaagucuuuuaucccagagaucuucaaacucuucuuguccaaaagacccauagaaggaguuucauagaugcuaagcguauccagggucauucuggcaaagaauuugccaucauggcuccacuuaaaaauaggccaaugggcugagcucucacagugaaaaccccucuucuugugccccguaaggaugucccagaugauuauggccugagggucauccugcguguccaucagggggcuaaaggucaccagguaccuuucacaaggugagaagucaauaagcugaaccccuugguggcugaaucucugaauuugcuugaauuucucucccccccauagagcaaugccucuuugaugaaagguagccagguaggugcccuuaggagaccaacgcacauacgucucuguccaucucgcucuuucuucaauugagacagggucuuuuacgucauuccagaauauggaagugcggucuccacucucaaaaaucacacuguacugaucucugcauucugccucuucaagccaguaacguaaguuccccaggucuuugaaaggcuguuucucuggaauaucccacucgucacugaucgucauauacuugucaaaauccguaaagagguugacccggaaugugugcugcuugucaagcuuguagccgucggcguucuucacagcauccacagcgugggcaggggacgcguacuccaggaaaauauacccuuuugucuucccauccucuucaggauaaaaaucauuugugauuuucccaaacuuggaaaagaucuuguggaugacauuuuugaguuucucaagucggucgggucccaccugagggacauuguccacuacaaucaccgaaucgauuccaucugcuuccuggggccgaucuuugaguacaucucccaguaauu

SEQ ID NO: 2129 - RNA, 3150 nt, Homo sapiens
ugcuggcucgcaggacgcgaguguagagaugcggcuggcucuccuuuccucuucuagucugucuaccuugcccugugcuggcuucugggacugcgcugucccacugcgcagccuggcaucuuggaaggcguccccugccccggccccacacggacuucaguccuccccaggcaccacugccucuggacacacugacacacacgccuacggccgcagcccucauggaacgaagcccaaguugcgacagacagaggcugagaaagucagggggacagccuagggucuucugcacccaggagguccagggcugcaaagccacauaggguuggcccaaggcugagaagccucagggggugacgaggacgggccagugcaccuccuucccgcccagcccuccacaccauccccuuuggacgcgaggcugcuccuuugcugagggcuacggucggaucuccccacaggaggagacagagagcgagacagccggagagccgucacacgcaggacccaccuugaagaugaggcagucgccugggugcucggcguacagcgaggucagccgguacugguucuccguggugaugucgaucugguagccggugagcguguagcaggccuugcggaacuccuggaucuuggucuggaaaaccuccuugagccgcugguucuucagcucggcacucuccaccugcuucuucagcucugccaccuccuuggacgauggcagacucgcggcggcagccucaaggucggcugggacggugccuccucucuccauggcgcgcaggagcccgcgcagucgcucgcacuccgccugcagcuggcugugguccucgcgcaggcgcugccuggccacacuggugggguucaggcucaugugcagcacuuugguccugcucuggucauagucacccuugaucuguuccuggcucaggagugugggaggccggggccgccacagcagcuggcagaagcgguccuuguuguucuucugcaggaggcgucccuggaaaguccacagccaguacgcguuguccaccuuauggcuccaccaggacacagaggugacgacguagcgcccaguaggaucccauucgacgucggaagccauguagugcucugcgauguucaugaccgugcaguccgaaguguccacaaacgcuaaggcaccguucauacuccucaggcccgccaacaccacgaacuguccuugggggcuccagaagaugguguucgccugcugcuugucgaacaucuugaugaguucaaucuucccguuguuuuugacgugguagaaagacacagauauccgcggagccucuccgugcagcacagcaaacuuacuuccauuugguucccaggcaaaggcuaugaugguuucuuucaucucgaccacauccacagguaccuguuucucccucauucggaaaauuucaaaauuugugacaacacccugggugccuuucggaguccuaucuacuuucacacacaaguagucuccguucuucugccaauggagcuugcaguccaccacauugaacagguuccucacucggaucucuugccugguagggagcugcaucaggguuacccuggcuggaauaucuuugucuucaggcacccagaaggcgauuauguuaccaccaggagaccaagaaaagucuuuuaucccagagaucuucaaacucuucuuguccaaaagacccauagaaggaguuucauagaugcuaagcguauccagggucauucuggcaaagaauuugccaucauggcuccacuuaaaaauaggccaaugggcugagcucucacagugaaaaccccucuucuugugccccguaaggaugucccagaugauuauggccugagggucauccugcguguccaucagggggcuaaaggucaccagguaccuuucacaaggugagaagucaauaagcugaaccccuugguggcugaaucucugaauuugcuugaauuucucucccccccauagagcaaugccucuuugaugaaagguagccagguaggugcccuuaggagaccaacgcacauacgucucuguccaucucgcucuuucuucaauugagacagggucuuuuacgucauuccagaauauggaagugcggucuccacucucaaaaaucacacuguacugaucucugcauucugccucuucaagccaguaacguaaguuccccaggucuuugaaaggcuguuucucuggaauaucccacucgucacugaucgucauauacuugucaaaauccguaaagagguugacccggaaugugugcugcuugucaagcuuguagccgucggcguucuucacagcauccacagcgugggcaggggacgcguacuccaggaaaauauacccuuuugucuucccauccucuucaggauaaaaaucauuugugauuuucccaaacuuggaaaagaucuuguggaugacauuuuugaguuucucaagucggucgggucccaccugagggacauuguccacuacaaucaccgaaucgauuccaucugcuuccuggggccgaucuuugaguacaucucccaguaauucuuccucgcucacgucguccacgaaguccucggggucgcugaaggagggcucguccgcgucgccguucuccagcgcccgggguucggccucggccgcucugcccucguuuccucccgcguccucggacaccgccugggcccggcugucggagcgcucgucccgagccugcucuccuggggccucgcccugugccgggacagggggcucagcaugcgacccgggcagcuccucggcggccggcggcgagggcgacucggacgggccggaggccgccucugccucggccgccggcucgguccucaccucggacuccggcccggccuccgcgauccccaccuccucacuggaggccucgguccccgcggccuccggagcgccgggccccgcgggccgcagcagccccucggcuggcggcggcucggcggccggcugcugcuggccgggcucggcgcgcuccucggccgccucgggcaccgccacguucuccgcguccugcaugggcccaacgcugccuacucgcagggcuccgcggccgccgcgcuuccgacucucccaggccgcaccgcgcgccgcgacggcua

SEQ ID NO: 2130 - RNA, 2568 nt, Homo sapiens
ugcuggcucgcaggacgcgaguguagagaugcggcuggcucuccuuuccucuucuagucugucuaccuugcccugugcuggcuucugggacugcgcugucccacugcgcagccuggcaucuuggaaggcguccccugccccggccccacacggacuucaguccuccccaggcaccacugccucuggacacacugacacacacgccuacggccgcagcccucauggaacgaagcccaaguugcgacagacagaggcugagaaagucagggggacagccuagggucuucugcacccaggagguccagggcugcaaagccacauaggguuggcccaaggcugagaagccucagggggugacgaggacgggccagugcaccuccuucccgcccagcccuccacaccauccccuuuggacgcgaggcugcuccuuugcugagggcuacggucggaucuccccacaggaggagacagagagcgagacagccggagagccgucacacgcaggacccaccuugaagaugaggcagucgccugggugcucggcguacagcgaggucagccgguacugguucuccguggugaugucgaucugguagccggugagcguguagcaggccuugcggaacuccuggaucuuggucuggaaaaccuccuugagccgcugguucuucagcucggcacucuccaccugcuucuucagcucugccaccuccuuggacgauggcagacucgcggcggcagccucaaggucggcugggacggugccuccucucuccauggcgcgcaggagcccgcgcagucgcucgcacuccgccugcagcuggcugugguccucgcgcaggcgcugccuggccacacuggugggguucaggcucaugugcagcacuuugguccugcucuggucauagucacccuugaucuguuccuggcucaggagugugggaggccggggccgccacagcagcuggcagaagcgguccuuguuguucuucugcaggaggcgucccuggaaaguccacagccaguacgcguuguccaccuuauggcuccaccaggacacagaggugacgacguagcgcccaguaggaucccauucgacgucggaagccauguagugcucugcgauguucaugaccgugcaguccgaaguguccacaaacgcuaaggcaccguucauacuccucaggcccgccaacaccacgaacuguccuugggggcuccagaagaugguguucgccugcugcuugucgaacaucuugaugaguucaaucuucccguuguuuuugacgugguagaaagacacagauauccgcggagccucuccgugcagcacagcaaacuuacuuccauuugguucccaggcaaaggcuaugaugguuucuuucaucucgaccacauccacagguaccuguuucucccucauucggaaaauuucaaaauuugugacaacacccugggugccuuucggaguccuaucuacuuucacacacaaguagucuccguucuucugccaauggagcuugcaguccaccacauugaacagguuccucacucggaucucuugccugguagggagcugcaucaggguuacccuggcuggaauaucuuugucuucaggcacccagaaggcgauuauguuaccaccaggagaccaagaaaagucuuuuaucccagagaucuucaaacucuucuuguccaaaagacccauagaaggaguuucauagaugcuaagcguauccagggucauucuggcaaagaauuugccaucauggcuccacuuaaaaauaggccaaugggcugagcucucacagugaaaaccccucuucuugugccccguaaggaugucccagaugauuauggccugagggucauccugcguguccaucagggggcuaaaggucaccagguaccuuucacaaggugagaagucaauaagcugaaccccuugguggcugaaucucugaauuugcuugaauuucucucccccccauagagcaaugccucuuugaugaaagguagccagguaggugcccuuaggagaccaacgcacauacgucucuguccaucucgcucuuucuucaauugagacagggucuuuuacgucauuccagaauauggaagugcggucuccacucucaaaaaucacacuguacugaucucugcauucugccucuucaagccaguaacguaaguuccccaggucuuugaaaggcuguuucucuggaauaucccacucgucacugaucgucauauacuugucaaaauccguaaagagguugacccggaaugugugcugcuugucaagcuuguagccgucggcguucuucacagcauccacagcgugggcaggggacgcguacuccaggaaaauauacccuuuugucuucccauccucuucaggauaaaaaucauuugugauuuucccaaacuuggaaaagaucuuguggaugacauuuuugaguuucucaagucggucgggucccaccugagggacauuguccacuacaaucaccgaaucgauuccaucugcuuccuggggccgaucuuugaguacaucucccaguaauu

SEQ ID NO: 2131 - RNA, 2805 nt, Homo sapiens
ugcuggcucgcaggacgcgaguguagagaugcggcuggcucuccuuuccucuucuagucugucuaccuugcccugugcuggcuucugggacugcgcugucccacugcgcagccuggcaucuuggaaggcguccccugccccggccccacacggacuucaguccuccccaggcaccacugccucuggacacacugacacacacgccuacggccgcagcccucauggaacgaagcccaaguugcgacagacagaggcugagaaagucagggggacagccuagggucuucugcacccaggagguccagggcugcaaagccacauaggguuggcccaaggcugagaagccucagggggugacgaggacgggccagugcaccuccuucccgcccagcccuccacaccauccccuuuggacgcgaggcugcuccuuugcugagggcuacggucggaucuccccacaggaggagacagagagcgagacagccggagagccgucacacgcaggacccaccuugaagaugaggcagucgccugggugcucggcguacagcgaggucagccgguacugguucuccguggugaugucgaucugguagccggugagcguguagcaggccuugcggaacuccuggaucuuggucuggaaaaccuccuugagccgcugguucuucagcucggcacucuccaccugcuucuucagcucugccaccuccuuggacgauggcagacucgcggcggcagccucaaggucggcugggacggugccuccucucuccauggcgcgcaggagcccgcgcagucgcucgcacuccgccugcagcuggcugugguccucgcgcaggcgcugccuggccacacuggugggguucaggcucaugugcagcacuuugguccugcucuggucauagucacccugcagagcucgccgcuccagcugugccuccagcauccucuuuuccuccuccagccgacuccgcucgccuuccagcuccucgaccuucaaccugagcguguccgccuccucccuggagaacaggaagcucuguucggcagagcuggacugagacuucagcaucuucagcuccaucuccagcaugucugcucuuuguuucuggccucccagcuccuccagggccugcgacagcugagccuugaucuguuccuggcucaggagugugggaggccggggccgccacagcagcuggcagaagcgguccuuguuguucuucugcaggaggcgucccuggaaaguccacagccaguacgcguuguccaccuuauggcuccaccaggacacagaggugacgacguagcgcccaguaggaucccauucgacgucggaagccauguagugcucugcgauguucaugaccgugcaguccgaaguguccacaaacgcuaaggcaccguucauacuccucaggcccgccaacaccacgaacuguccuugggggcuccagaagaugguguucgccugcugcuugucgaacaucuugaugaguucaaucuucccguuguuuuugacgugguagaaagacacagauauccgcggagccucuccgugcagcacagcaaacuuacuuccauuugguucccaggcaaaggcuaugaugguuucuuucaucucgaccacauccacagguaccuguuucucccucauucggaaaauuucaaaauuugugacaacacccugggugccuuucggaguccuaucuacuuucacacacaaguagucuccguucuucugccaauggagcuugcaguccaccacauugaacagguuccucacucggaucucuugccugguagggagcugcaucaggguuacccuggcuggaauaucuuugucuucaggcacccagaaggcgauuauguuaccaccaggagaccaagaaaagucuuuuaucccagagaucuucaaacucuucuuguccaaaagacccauagaaggaguuucauagaugcuaagcguauccagggucauucuggcaaagaauuugccaucauggcuccacuuaaaaauaggccaaugggcugagcucucacagugaaaaccccucuucuugugccccguaaggaugucccagaugauuauggccugagggucauccugcguguccaucagggggcuaaaggucaccagguaccuuucacaaggugagaagucaauaagcugaaccccuugguggcugaaucucugaauuugcuugaauuucucucccccccauagagcaaugccucuuugaugaaagguagccagguaggugcccuuaggagaccaacgcacauacgucucuguccaucucgcucuuucuucaauugagacagggucuuuuacgucauuccagaauauggaagugcggucuccacucucaaaaaucacacuguacugaucucugcauucugccucuucaagccaguaacguaaguuccccaggucuuugaaaggcuguuucucuggaauaucccacucgucacugaucgucauauacuugucaaaauccguaaagagguugacccggaaugugugcugcuugucaagcuuguagccgucggcguucuucacagcauccacagcgugggcaggggacgcguacuccaggaaaauauacccuuuugucuucccauccucuucaggauaaaaaucauuugugauuuucccaaacuuggaaaagaucuuguggaugacauuuuugaguuucucaagucggucgggucccaccugagggacauuguccacuacaaucaccgaaucgauuccaucugcuuccuggggccgaucuuugaguacaucucccaguaauu

SEQ ID NO: 2132 - RNA, 3076 nt, Homo sapiens
gugucuaggggagaagauuuuauuucacaaggugaggaacccaggcugguggccgacgcccacacaccaggcuccgggacgcauggggucugcacguggagagggugcuggccgccccagcaggaagcccgacguaggucccagcgugucugucagucaugcugcugcccuguggggcuggagaggcaggacgugcacccagccuguggcuggcggggcaggggaccugcaggucaggccaagcagaguggcuccggcuaugcccccgagccugcaggcuacgccacggucuggcggcugaagagcucgagggugagcgagcugaggaaggcagggaugcuguccuggcgccgcaggugcaccucgaugagcucgcccacggugugugagaacucugucuccaguagcugcaucuuggaacccgaggggcugguggccuugaagaugaggcagucgccugggugcucggcguacagcgaggucagccgguacugguucuccguggugaugucgaucugguagccggugagcguguagcaggccuugcggaacuccuggaucuuggucuggaaaaccuccuugagccgcugguucuucagcucggcacucuccaccugcuucuucagcucugccaccuccuuggacgauggcagacucgcggcggcagccucaaggucggcugggacggugccuccucucuccauggcgcgcaggagcccgcgcagucgcucgcacuccgccugcagcuggcugugguccucgcgcaggcgcugccuggccacacuggugggguucaggcucaugugcagcacuuugguccugcucuggucauagucacccuugaucuguuccuggcucaggagugugggaggccggggccgccacagcagcuggcagaagcgguccuuguuguucuucugcaggaggcgucccuggaaaguccacagccaguacgcguuguccaccuuauggcuccaccaggacacagaggugacgacguagcgcccaguaggaucccauucgacgucggaagccauguagugcucugcgauguucaugaccgugcaguccgaaguguccacaaacgcuaaggcaccguucauacuccucaggcccgccaacaccacgaacuguccuugggggcuccagaagaugguguucgccugcugcuugucgaacaucuugaugaguucaaucuucccguuguuuuugacgugguagaaagacacagauauccgcggagccucuccgugcagcacagcaaacuuacuuccauuugguucccaggcaaaggcuaugaugguuucuuucaucucgaccacauccacagguaccuguuucucccucauucggaaaauuucaaaauuugugacaacacccugggugccuuucggaguccuaucuacuuucacacacaaguagucuccguucuucugccaauggagcuugcaguccaccacauugaacagguuccucacucggaucucuugccugguagggagcugcaucaggguuacccuggcuggaauaucuuugucuucaggcacccagaaggcgauuauguuaccaccaggagaccaagaaaagucuuuuaucccagagaucuucaaacucuucuuguccaaaagacccauagaaggaguuucauagaugcuaagcguauccagggucauucuggcaaagaauuugccaucauggcuccacuuaaaaauaggccaaugggcugagcucucacagugaaaaccccucuucuugugccccguaaggaugucccagaugauuauggccugagggucauccugcguguccaucagggggcuaaaggucaccagguaccuuucacaaggugagaagucaauaagcugaaccccuugguggcugaaucucugaauuugcuugaauuucucucccccccauagagcaaugccucuuugaugaaagguagccagguaggugcccuuaggagaccaacgcacauacgucucuguccaucucgcucuuucuucaauugagacagggucuuuuacgucauuccagaauauggaagugcggucuccacucucaaaaaucacacuguacugaucucugcauucugccucuucaagccaguaacguaaguuccccaggucuuugaaaggcuguuucucuggaauaucccacucgucacugaucgucauauacuugucaaaauccguaaagagguugacccggaaugugugcugcuugucaagcuuguagccgucggcguucuucacagcauccacagcgugggcaggggacgcguacuccaggaaaauauacccuuuugucuucccauccucuucaggauaaaaaucauuugugauuuucccaaacuuggaaaagaucuuguggaugacauuuuugaguuucucaagucggucgggucccaccugagggacauuguccacuacaaucaccgaaucgauuccaucugcuuccuggggccgaucuuugaguacaucucccaguaauucuuccucgcucacgucguccacgaaguccucggggucgcugaaggagggcucguccgcgucgccguucuccagcgcccgggguucggccucggccgcucugcccucguuuccucccgcguccucggacaccgccugggcccggcugucggagcgcucgucccgagccugcucuccuggggccucgcccugugccgggacagggggcucagcaugcgacccgggcagcuccucggcggccggcggcgagggcgacucggacgggccggaggccgccucugccucggccgccggcucgguccucaccucggacuccggcccggccuccgcgauccccaccuccucacuggaggccucgguccccgcggccuccggagcgccgggccccgcgggccgcagcagccccucggcuggcggcggcucggcggccggcugcugcuggccgggcucggcgcgcuccucggccgccucgggcaccgccacguucuccgcguccugcaugggcccaacgcugccuacucgcagggcuccgcggccgccgcgcuuccgacucucccaggccgcaccgcgcgccgcgacggcua

SEQ ID NO: 2133 - RNA, 2144 nt, Homo sapiens
uuccuuuugcuacaaaaugcauuuauuuccagucagacaaaauucuugaacuguauauucggguacauauuauaaggucaucuuugauauaugcccuguuuacaagauccauuucuaauuauuaaagugaauaucaaacacacaucuuugcaucuuaaaacauaaauaaacugcuaauguuuauaagccacaaaucuggucacugacaugaguggccugcaauucuucagugaugagcacacggcgauacagacaagaucagauuacccagguaggcaggcagcaggcaccuguaauucacccgcugacugugcuguuguggcagugacccuucuugugaaaaaagaguuaugugcagacaaaagugugacauaugcaacguggagaggcauuucacagaaugcaaacaccauucagguaaauuaguagacuccagaaugaaugaaagcuucaugaaugcaaaccuguuguuuacaauacugggcauuguggcaccuuuucacuggacaguuuaauaaauaucuauuaaagaaaguaaggauaagagaagaagcugaagcagucgucuuggugcacaacauauuuucaagauugggcuuuagguugugaguuucagagauaccauuguuuguuucuucagaguaaaucauucuauuuggaaagcccuucauuuccuuaaaaagaccuuuaaauucuucauuagcauuaagagacuucuuguagacugccaggaauugggguucauuggcuuaaagaagagcacagcacaguugacagaacgucuugguuugucucuugaauuaagaagccugauuggcucagaauuucucagaucuacuuuauucuucacacuuucccuccuuuuggcuccuguuaacaucccaagcccacagagacagacgcucauagguggagcgguauacuucauaaaaucucauuucauuaucaacuauuucuagugccauggcucccucuggacucuaaauaguugauaucugaaaguuccauccuucacagaguucuucacuugcuccuugaagguaagguucuuguucuaaggcugaugcugggaaggucccauagaggaaauuccuggagaaucucuauucccuuuggguucucgugcccucucucucacuccccauaaggcuaugguugcaauucuggagacacauaggaaaaguuucuaaacucauccugguuaaucauuggaagaugucccucaucaauuggaguuaaaacuggcucuuccuuuaugaagucagggucaaaauuacugacaucuucucgggauuugauucugggucugaaaggcgguucuauuuggcgaugguucagcugggcccagucgauuuccuuaaaaaaaggaugucucaagauggcgugcucgccucccugagucaggcugcccaagcgcauggugggguucuuggucaugaaagauuuuaggaucccuguggcaucuucauggagccagguaggguagaccaccucaucauucaguauggccucaaagaggucaucuucguucucugccucaaaaggcgcgugaccacagagcaucucauagagcaacacgcccauugcccaccagucuacugcaggcccguacagcauuuccuggaggaucucuggagcgauauagucuggcgugccacagaauguggccguggugacaccauugcaaauccccuccuugcacauuccgaagucugccaguuuacagugacccucgugguccaacaggacauuguccaguuucagaucucuauagaugauuccuuuaucauggaggaacaugagagccgaaaugauuucugcagcauagaagcgagcucgugcuucaucaaaacgacgagacuucugaauguggaacaucaagucacccccauucacaaacuccaucacaaaaaacagacgauccucccaugguuucugcaccuucauuuccaaaggcaagugaaaacagugccaggcugcgcacauggguuacuccagggacuucucuucccguuuccccuaaagcauuugacaguuagaucuuggaacugaguccagcagcacugaggucagagagauggcuaaagcuaaaagcaaacuggaugcuguucaggagguucuccuuugucauuuuuaucuccaaa

SEQ ID NO: 2134 - RNA, 2995 nt, Homo sapiens
uuccuuuugcuacaaaaugcauuuauuuccagucagacaaaauucuugaacuguauauucggguacauauuauaaggucaucuuugauauaugcccuguuuacaagauccauuucuaauuauuaaagugaauaucaaacacacaucuuugcaucuuaaaacauaaauaaacugcuaauguuuauaagccacaaaucuggucacugacaugaguggccugcaauucuucagugaugagcacacggcgauacagacaagaucagauuacccagguaggcaggcagcaggcaccuguaauucacccgcugacugugcuguuguggcagugacccuucuugugaaaaaagaguuaugugcagacaaaagugugacauaugcaacguggagaggcauuucacagaaugcaaacaccauucagguaaauuaguagacuccagaaugaaugaaagcuucaugaaugcaaaccuguuguuuacaauacugggcauuguggcaccuuuucacuggacaguuuaauaaauaucuauuaaagaaaguaaggauaagagaagaagcugaagcagucgucuuggugcacaacauauuuucaagauugggcuuuagguugugaguuucagagauaccauuguuuguuucuucagaguaaaucauucuauuuggaaagcccuucauuuccuuaaaaagaccuuuaaauucuucauuagcauuaagagacuucuuguagacugccaggaauugggguucauuggcuuaaagaagagcacagcacaguugacagaacgucuugguuugucucuugaauuaagaagccugauuggcucagaauuucucagaucuacuuuauucuucacacuuucccuccuuuuggcuccuguuaacaucccaagcccacagagacagacgcucauagguggagcgguauacuucauaaaaucucauuucauuaucaacuauuucuagugccauggcucccucuggacucuaaauaguugauaucugaaaguuccauccuucacagaguucuucacuugcuccuugaagguaagguucuuguucuaaggcugaugcugggaaggucccauagaggaaauuccuggagaaucucuauucccuuuggguucucgugcccucucucucacuccccauaaggcuaugguugcaauucuggagacacauaggaaaaguuucuaaacucauccugguuaaucauuggaagaugucccucaucaauuggaguuaaaacuggcucuuccuuuaugaagucagggucaaaauuacugacaucuucucgggauuugauucugggucugaaaggcgguucuauuuggcgaugguucagcugggcccagucgauuuccuuaaaaaaaggaugucucaagauggcgugcucgccucccugagucaggcugcccaagcgcauggugggguucuuggucaugaaagauuuuaggaucccuguggcaucuucauggagccagguaggguagaccaccucaucauucaguauggccucaaagaggucaucuucguucucugccucaaaaggcgcgugaccacagagcaucucauagagcaacacgcccauugcccaccagucuacugcaggcccguacagcauuuccuggaggaucucuggagcgauauagucuggcgugccacagaauguggccguggugacaccauugcaaauccccuccuugcacauuccgaagucugccaguuuacagugacccucgugguccaacaggacauuguccaguuucagaucucuauagaugauuccuuuaucauggaggaacaugagagccgaaaugauuucugcagcauagaagcgagcucgugcuucaucaaaacgacgagacuucugaauguggaacaucaagucacccccauucacaaacuccaucacaaaaaacagacgaucgggggucugaaagcagcagaacaacugagugaggaaggggugauugcgggccagagacaggauccuuuucucggucauggugcauuccacaucaucauccugcagaaucacguccuucuucagcaccuucacagcauagaggucuccuguuucuuuuacucuugcaagcaucaccuucccaaaacuccccuuccccaacacucggaugaacucaaaguugucgauaccaagucgguuggaagaauuaaccccaaucccauuuccuucuuugcugcucuccuuucccugucgucuuagggucgaucuggaaacgaguuucgagguuggagaaauauuuccggguuggagacccaucccugccagggucuuggcaaguuccaccgcauuuaccccacaguuaggggccacguucgcuugacaucgaauaugcacauucauuuuacauauuuuacacugaaguccuugucgcauuauuccccagagcagugagccacagugaucgcagaauguuggcacuuuguaguuguggaugcugaacuugugugggauguugaucccgaaccucuguucugcaaucuuugaauccacuuuguuaauauuguuuuggcaaguacaggcuguaacaauuagaugauggcagcguuuauggacgacacaggugcacacuuggcacugauaacccuguuucccaaacacuccccagauaaacucccugcagugagagcaguaggugggcugccucagauacguggccaugaacuuguguccauugaucugguggacucgccuucgcauagcccuuuggcgcuuccugguaaaauguuugaagauccggucucucuggagaguagcucccaugguuucugcaccuucauuuccaaaggcaagugaaaacagugccaggcugcgcacauggguuacuccagggacuucucuucccguuuccccuaaagcauuugacaguuagaucuuggaacugaguccagcagcacugaggucagagagauggcuaaagcuaaaagcaaacuggaugcuguucaggagguucuccuuugucauuuuuaucuccaaa

SEQ ID NO: 2135 - skipped

SEQ ID NO: 2136 - RNA, 904 nt, Homo sapiens
cuuucuuggucuaccaccucuauucuggcuucacuauuugcccaugcaaccgggaccccagauuugucacugaagaaacugauucauuacgcauggacuuccuuucauguucucuguuugcagcuggucauggguuggucuuucagagaagugacuaagguaaagaaugggagagacuagaaaugagccuucuucuuagaaaguuuuaguguuucccaauugccuagugaacuaggaaaaucccccucacucuucaguucaaaguucuccauuccauggucccauuuucccuguccagugaguucccaacugugcuccaaugaggacuaaagguuccgaggaguaacaucuggguuucuaggaaggccgaaguggaggcuaagcagucaacacuccagguuucacccagagcagcuccacuuuuaucaggugcuuugccuuagcgcguuccuccucgcuacauauccucucccgaaggauggcucugguuaacugcucauuggcagcagcccucucucgguccagcucuuuggcuugcuuuagucuuaguaauggguggaauaugacgguaauguuucuggcuccagguuugcagacaaauuuuguuccuccaccuucaauuaaguugucaucaggaccccccgaugaauucaucuuaaaacagaugaauuaauuggcccuaaaucucgaggaguucaguaaaacuugccaugcacagaagggcugucuggguguaaaagccucacaguuaccucuccaauaguacccuguagaccaauauccucuaucuccauguuggcaacaagucuucauugagaugguuucacggcucccauugcucacuucugauuguuucuuuuucaacugagugagaucacauuuagcaauagcuaggugguuaucu

SEQ ID NO: 2137 - RNA, 2772 nt, Homo sapiens
ugccagucuuugucagaaaauauauuuauuauugauagugagugaaguaaagaugugaguauucacuauagagguuuuaucagccaagguugccuucauauugauaaaaauaccuuaucucacuuguaaucauaaacauuauuccaguagaagagguacauuuucucuccuuuuugucuucuugccuguauaaucaccauaauaaguuauaaugaaauagcucuuacauaaucaaaggagaaaagaaagacaaaaccaacaugccacagccuagacaauuccauccagcacugcugccuccagaucuguuuucuggcucucuccacccagcacugcugcccucggaucuauguuuucuggcucucuccucgccccacuccaauuaauuuagcccccaaccccauccuacuuuguuaggguggagguucaccaaaugauggggcuuguucagaagagaaacauuuuauggucagugcaaguugaauagaaaguaccaaaagguggagagggcugcccuucucuuuuaaucaucauaagaggguuuacuaauacucaagaguguccuuuaaugacugaucccugaucaaggcuuuggcccuucaaacugcugcuguucaaaacgugaaaugauucugcugaauccauucuugaugucucucuuuaguggucuucucauuaguggucuucucuucaaauggguuguuuucucacuaggaaaaaaaauguuccaucucuggaauuaacguugaugguguuuugcucauucugaaaguuuuuauccucccuucucaagcaugcucuguuuggcaugauugacacagugcauauacuggguggccagagcggagcauuugagggucugguggguguucucacgguaacacugaagaauuuuggccugcagaucagcacagacuggaugagacucauaucgcuugaacuuugcuuccaccucuucagcagcuuucugauauuguucaguggugacucuguagaacucugagcuccucuccuccagucuagccagcuguucuuuguagaaugcauccugcuucuuuagcacucggucuuucucuuccagcugccuagcuuugucuucaauauccaggugcuuugccuuagcgcguuccuccucgcuacauauccucucccgaaggauggcucugguuaacugcucauuggcagcagcccucucucgguccagcucuuuggcuugcuuuagucuuaguaauggguggaauaugacgguaauguuucuggcuccagguuugcagacaaauuuuguuccuccaccuucaauuaaguugucaucaggacccccuugcaguucuccacuccgacuauagagcucccuucucuguucucgcagauaggcgcucauacugauggcaugggaggacgauucgaacuugaaaagagaauuuuuuggccuuugagguuucuucuuggcaaaaaaggcugcaaacucucguccagugcuggcauagcuuaguugagcugaugguucagaggccguacgaguauuuuucauauccaaguacucaguuaauagcaucuguagaacaucuuggaucuucacccauacaucugccauaucauacaguuugauaucuuccugcugagucaguggagucacuacaguguccugcagguaucccaggaccacagagugugcagcggcuacagcauuaaacuugucaaacaguaacuccagcaguucuagaagcaaccuugguugguucuccacaguaacguucuccccccgcugauagccacugucugccaccuggguuguagaccucuucacaauuugcuucaacuccugcuccaagcgcucuaugauugccuuaacuguuucugggaucuucuucaguuucgccaagcccuuaaugaggauacccauaaacagggugcuguuuuccucuggauccaauucuaaaucuuccuugauguccugcagauuuaucucccucacacuugagcuuccagcaguagaauagugagagguaucaaggaauuuucgaggaguagggagguuuguaacaucaaucagaggaacagaagcaucuuucacgagggagcugauuuucccuuuuuccuuguuacgcugcacaacucggcuagucgauuugauguacaggugccgguguaguucaucuaugagaaccaagugaagguucaucuucuugcugugaagcucuagucgaaggucacucaguccuuccaccuggagcagggggcccuccaaagacucaacugcugacaccaacaugucaguggcacugagauagugcuugcuggccaugcacuguuccagcuuuugaggcacuugcuugauauucucaauuucauccaacaaguucaggacaugcuuaugcucaauuccuucaauccacaguuuccgaagcucaucccguuugcagugcagcagcaucuugcaugaaagcagguucucuuuuaccugcuuuauuuuauuucgggaguuagugaugcgcucugugaugcucugguaugugcgaauggcugucgucaauucuguguagugcuguacaaucaauucauccaggucacggucacauuucucguaggcuucuucaaggcgacccuuuucauuuucccugucuucgacaucgucacuaguagacagaguccugaucacagagaugagcagccccgaggggucuuugcuuuugcugacugugcuucuguauuucccaccagcugcuucugccgccaucuuggacgcggggagagccgcuaggcuccaaggaa

SEQ ID NO: 2138 - skipped

SEQ ID NO: 2139 - RNA, 1568 nt, Homo sapiens
ugccagucuuugucagaaaauauauuuauuauugauagugagugaaguaaagaugugaguauucacuauagagguuuuaucagccaagguugccuucauauugauaaaaauaccuuaucucacuuguaaucauaaacauuauuccaguagaagagguacauuuucucuccuuuuugucuucuugccuguauaaucaccauaauaaguuauaaugaaauagcucuuacauaaucaaaggagaaaagaaagacaaaaccaacaugccacagccuagacaauuccauccagcacugcugccuccagaucuguuuucuggcucucuccacccagcacugcugcccucggaucuauguuuucuggcucucuccucgccccacuccaauuaauuuagcccccaaccccauccuacuuuguuaggguggagguucaccaaaugauggggcuuguucagaagagaaacauuuuauggucagugcaaguugaauagaaaguaccaaaagguggagagggcugcccuucucuuuuaaucaucauaagaggguuuacuaauacucaagaguguccuuuaaugacugaucccugaucaaggcuuuggcccuucaaacugcugcuguucaaaacgugaaaugauucugcugaauccauucuugaugucucucuuuaguggucuucucauuaguggucuucucuucaaauggguuguuuucucacuaggaaaaaaaauguuccaucucuggaauuaacguugaugguguuuugcucauucugaaaguuuuuauccucccuucucaagcaugcucuguuuggcaugauugacacagugcauauacuggguggccagagcggagcauuugagggucugguggguguucucacgguaacacugaagaauuuuggccugcagaucagcacagacuggaugagacucauaucgcuugaacuuugcuuccaccucuucagcagcuuucugauauuguucaguggugacucuguagaacucugagcuccucuccuccagucuagccagcuguucuuuguagaaugcauccugcuucuuuagcacucggucuuucucuuccagcugccuagccaggugcuuugccuuagcgcguuccuccucgcuacauauccucucccgaaggauggcucugguuaacugcucauuggcagcagcccucucucgguccagcucuuuggcuugcuuuagucuuaguaauggguggaauaugacgguaauguuucuggcuccagguuugcagacaaauuuuguuccuccaccuucaauuaaguugucaucaggaccccccgaugaauucaucuuaaaacagaugaauuaauuggcccuaaaucucgaggaguucaguaaaacuugccaugcacagaagggcugucuggguguaaaagccucacaguuaccucuccaauaguacccuguagaccaauauccucuaucuccauguuggcaacaagucuucauugagaugguuucacggcucccauugcucacuucugauuguuucuuuuucaacugagugagaucacauuuagcaauagcuaggugguuaucu

SEQ ID NO: 2140 - RNA, 1605 nt, Homo sapiens
ugccagucuuugucagaaaauauauuuauuauugauagugagugaaguaaagaugugaguauucacuauagagguuuuaucagccaagguugccuucauauugauaaaaauaccuuaucucacuuguaaucauaaacauuauuccaguagaagagguacauuuucucuccuuuuugucuucuugccuguauaaucaccauaauaaguuauaaugaaauagcucuuacauaaucaaaggagaaaagaaagacaaaaccaacaugccacagccuagacaauuccauccagcacugcugccuccagaucuguuuucuggcucucuccacccagcacugcugcccucggaucuauguuuucuggcucucuccucgccccacuccaauuaauuuagcccccaaccccauccuacuuuguuaggguggagguucaccaaaugauggggcuuguucagaagagaaacauuuuauggucagugcaaguugaauagaaaguaccaaaagguggagagggcugcccuucucuuuuaaucaucauaagaggguuuacuaauacucaagaguguccuuuaaugacugaucccugaucaaggcuuuggcccuucaaacugcugcuguucaaaacgugaaaugauucugcugaauccauucuugaugucucucuuuaguggucuucucauuaguggucuucucuucaaauggguuguuuucucacuaggaaaaaaaauguuccaucucuggaauuaacguugaugguguuuugcucauucugaaaguuuuuauccucccuucucaagcaugcucuguuuggcaugauugacacagugcauauacuggguggccagagcggagcauuugagggucugguggguguucucacgguaacacugaagaauuuuggccugcagaucagcacagacuggaugagacucauaucgcuugaacuuugcuuccaccucuucagcagcuuucugauauuguucaguggugacucuguagaacucugagcuccucuccuccagucuagccagcuguucuuuguagaaugcauccugcuucuuuagcacucggucuuucucuuccagcugccuagccaggugcuuugccuuagcgcguuccuccucgcuacauauccucucccgaaggauggcucugguuaacugcucauuggcagcagcccucucucgguccagcucuuuggcuugcuuuagucuuaguaauggguggaauaugacgguaauguuucuggcuccagguuugcagacaaauuuuguuccuccaccuucaauuaaguugucaucaggacccccucuccaauaguacccuguagaccaauauccucuaucuccauguuggcaacaagucuucauugagaugguuucacggcucccauugcucacuucugauuguuucuuuuucaacugagugagaucacauuuagcaauagcuaggugguuaucucuacccccuugagaaauccgcuuuauagaucugggauuauugggauccucuccuuugcucauuuugguuuugcuugcuguuacuaaauuggccauguaagaaaacguuuuaaauaaaucaaaugcaaccgacagaugcccucuauaaa

SEQ ID NO: 2141 - skipped

SEQ ID NO: 2142 - RNA, 2780 nt, Homo sapiens
ugccagucuuugucagaaaauauauuuauuauugauagugagugaaguaaagaugugaguauucacuauagagguuuuaucagccaagguugccuucauauugauaaaaauaccuuaucucacuuguaaucauaaacauuauuccaguagaagagguacauuuucucuccuuuuugucuucuugccuguauaaucaccauaauaaguuauaaugaaauagcucuuacauaaucaaaggagaaaagaaagacaaaaccaacaugccacagccuagacaauuccauccagcacugcugccuccagaucuguuuucuggcucucuccacccagcacugcugcccucggaucuauguuuucuggcucucuccucgccccacuccaauuaauuuagcccccaaccccauccuacuuuguuaggguggagguucaccaaaugauggggcuuguucagaagagaaacauuuuauggucagugcaaguugaauagaaaguaccaaaagguggagagggcugcccuucucuuuuaaucaucauaagaggguuuacuaauacucaagaguguccuuuaaugacugaucccugaucaaggcuuuggcccuucaaacugcugcuguucaaaacgugaaaugauucugcugaauccauucuugaugucucucuuuaguggucuucucauuaguggucuucucuucaaauggguuguuuucucacuaggaaaaaaaauguuccaucucuggaauuaacguugaugguguuuugcucauucugaaaguuuuuauccucccuucucaagcaugcucuguuuggcaugauugacacagugcauauacuggguggccagagcggagcauuugagggucugguggguguucucacgguaacacugaagaauuuuggccugcagaucagcacagacuggaugagacucauaucgcuugaacuuugcuuccaccucuucagcagcuuucugauauuguucaguggugacucuguagaacucugagcuccucuccuccagucuagccagcuguucuuuguagaaugcauccugcuucuuuagcacucggucuuucucuuccagcugccuagcuuugucuucaauauccaggugcuuugccuuagcgcguuccuccucgcuacauauccucucccgaaggauggcucugguuaacugcucauuggcagcagcccucucucgguccagcucuuuggcuugcuuuagucuuaguaauggguggaauaugacgguaauguuucuggcuccagguuugcagacaaauuuuguuccuccaccuucaauuaaguugucaucaggacccccuugcaguucuccacuccgacuauagagcucccuucucuguucucgcagauaggcgcucauacugauggcaugggaggacgauucgaacuugaaaagagaauuuuuuggccuuugagguuucuucuuggcaaaaaaggcugcaaacucucguccagugcuggcauagcuuaguugagcugaugguucagaggccguacgaguauuuuucauauccaaguacucaguuaauagcaucuguagaacaucuuggaucuucacccauacaucugccauaucauacaguuugauaucuuccugcugagucaguggagucacuacaguguccugcagguaucccaggaccacagagugugcagcggcuacagcauuaaacuugucaaacaguaacuccagcaguucuagaagcaaccuugguugguucuccacaguaacguucuccccccgcugauagccacugucugccaccuggguuguagaccucuucacaauuugcuucaacuccugcuccaagcgcucuaugauugccuuaacuguuucugggaucuucuucaguuucgccaagcccuuaaugaggauacccauaaacagggugcuguuuuccucuggauccaauucuaaaucuuccuugauguccugcagauuuaucucccucacacuugagcuuccagcaguagaauagugagagguaucaaggaauuuucgaggaguagggagguuuguaacaucaaucagaggaacagaagcaucuuucacgagggagcugauuuucccuuuuuccuuguuacgcugcacaacucggcuagucgauuugauguacaggugccgguguaguucaucuaugagaaccaagugaagguucaucuucuugcugugaagcucuagucgaaggucacucaguccuuccaccuggagcagggggcccuccaaagacucaacugcugacaccaacaugucaguggcacugagauagugcuugcuggccaugcacuguuccagcuuuugaggcacuugcuugauauucucaauuucauccaacaaguucaggacaugcuuaugcucaauuccuucaauccacaguuuccgaagcucaucccguuugcagugcagcagcaucuugcaugaaagcagguucucuuuuaccugcuuuauuuuauuucgggaguuagugaugcgcucugugaugcucugguaugugcgaauggcugucgucaauucuguguagugcuguacaaucaauucauccaggucacggucacauuucucguaggcuucuucaaggcgacccuuuucauuuucccugucuucgacaucgucacuaguagacagaguccuuuacaccugguuuucucuaccaaacccaaauagcgugcuuuggggucccgagacuguaauagaaggugcugccccuaaagaaaagacugaggcggggcuccucucucuauagcuaaccccagaaaaa

SEQ ID NO: 2143 - RNA, 2603 nt, Homo sapiens
ugccagucuuugucagaaaauauauuuauuauugauagugagugaaguaaagaugugaguauucacuauagagguuuuaucagccaagguugccuucauauugauaaaaauaccuuaucucacuuguaaucauaaacauuauuccaguagaagagguacauuuucucuccuuuuugucuucuugccuguauaaucaccauaauaaguuauaaugaaauagcucuuacauaaucaaaggagaaaagaaagacaaaaccaacaugccacagccuagacaauuccauccagcacugcugccuccagaucuguuuucuggcucucuccacccagcacugcugcccucggaucuauguuuucuggcucucuccucgccccacuccaauuaauuuagcccccaaccccauccuacuuuguuaggguggagguucaccaaaugauggggcuuguucagaagagaaacauuuuauggucagugcaaguugaauagaaaguaccaaaagguggagagggcugcccuucucuuuuaaucaucauaagaggguuuacuaauacucaagaguguccuuuaaugacugaucccugaucaaggcuuuggcccuucaaacugcugcuguucaaaacgugaaaugauucugcugaauccauucuugaugucucucuuuaguggucuucucauuaguggucuucucuucaaauggguuguuuucucacuaggaaaaaaaauguuccaucucuggaauuaacguugaugguguuuugcucauucugaaaguuuuuauccucccuucucaagcaugcucuguuuggcaugauugacacagugcauauacuggguggccagagcggagcauuugagggucugguggguguucucacgguaacacugaagaauuuuggccugcagaucagcacagacuggaugagacucauaucgcuugaacuuugcuuccaccucuucagcagcuuucugauauuguucaguggugacucuguagaacucugagcuccucuccuccagucuagccagcuguucuuuguagaaugcauccugcuucuuuagcacucggucuuucucuuccagcugccuagccaggugcuuugccuuagcgcguuccuccucgcuacauauccucucccgaaggauggcucugguuaacugcucauuggcagcagcccucucucgguccagcucuuuggcuugcuuuagucguuucugaucuucggauucuuucuuggcuugcuccaaugccagcuccucagcuacucuucuuuucaauucuucaucagaaacugaggcaccauaagcaccagaauaccgcugagacuucgaaccagauggagaggauuccuucauucgaucaaucacauuuuccgaaagcuguagaacaucuuggaucuucacccauacaucugccauaucauacaguuugauaucuuccugcugagucaguggagucacuacaguguccugcagguaucccaggaccacagagugugcagcggcuacagcauuaaacuugucaaacaguaacuccagcaguucuagaagcaaccuugguugguucuccacaguaacguucuccccccgcugauagccacugucugccaccuggguuguagaccucuucacaauuugcuucaacuccugcuccaagcgcucuaugauugccuuaacuguuucugggaucuucuucaguuucgccaagcccuuaaugaggauacccauaaacagggugcuguuuuccucuggauccaauucuaaaucuuccuugauguccugcagauuuaucucccucacacuugagcuuccagcaguagaauagugagagguaucaaggaauuuucgaggaguagggagguuuguaacaucaaucagaggaacagaagcaucuuucacgagggagcugauuuucccuuuuuccuuguuacgcugcacaacucggcuagucgauuugauguacaggugccgguguaguucaucuaugagaaccaagugaagguucaucuucuugcugugaagcucuagucgaaggucacucaguccuuccaccuggagcagggggcccuccaaagacucaacugcugacaccaacaugucaguggcacugagauagugcuugcuggccaugcacuguuccagcuuuugaggcacuugcuugauauucucaauuucauccaacaaguucaggacaugcuuaugcucaauuccuucaauccacaguuuccgaagcucaucccguuugcagugcagcagcaucuugcaugaaagcagguucucuuuuaccugcuuuauuuuauuucgggaguuagugaugcgcucugugaugcucugguaugugcgaauggcugucgucaauucuguguagugcuguacaaucaauucauccaggucacggucacauuucucguaggcuucuucaaggcgacccuuuucauuuucccugucuucgacaucgucacuaguagacagaguccuuuacaccugguuuucucuaccaaacccaaauagcgugcuuuggggucccgagacuguaauagaaggugcugccccuaaagaaaagacugaggcggggcuccucucucuauagcuaaccccagaaaaa

SEQ ID NO: 2144 - RNA, 2757 nt, Homo sapiens
ugccagucuuugucagaaaauauauuuauuauugauagugagugaaguaaagaugugaguauucacuauagagguuuuaucagccaagguugccuucauauugauaaaaauaccuuaucucacuuguaaucauaaacauuauuccaguagaagagguacauuuucucuccuuuuugucuucuugccuguauaaucaccauaauaaguuauaaugaaauagcucuuacauaaucaaaggagaaaagaaagacaaaaccaacaugccacagccuagacaauuccauccagcacugcugccuccagaucuguuuucuggcucucuccacccagcacugcugcccucggaucuauguuuucuggcucucuccucgccccacuccaauuaauuuagcccccaaccccauccuacuuuguuaggguggagguucaccaaaugauggggcuuguucagaagagaaacauuuuauggucagugcaaguugaauagaaaguaccaaaagguggagagggcugcccuucucuuuuaaucaucauaagaggguuuacuaauacucaagaguguccuuuaaugacugaucccugaucaaggcuuuggcccuucaaacugcugcuguucaaaacgugaaaugauucugcugaauccauucuugaugucucucuuuaguggucuucucauuaguggucuucucuucaaauggguuguuuucucacuaggaaaaaaaauguuccaucucuggaauuaacguugaugguguuuugcucauucugaaaguuuuuauccucccuucucaagcaugcucuguuuggcaugauugacacagugcauauacuggguggccagagcggagcauuugagggucugguggguguucucacgguaacacugaagaauuuuggccugcagaucagcacagacuggaugagacucauaucgcuugaacuuugcuuccaccucuucagcagcuuucugauauuguucaguggugacucuguagaacucugagcuccucuccuccagucuagccagcuguucuuuguagaaugcauccugcuucuuuagcacucggucuuucucuuccagcugccuagccaggugcuuugccuuagcgcguuccuccucgcuacauauccucucccgaaggauggcucugguuaacugcucauuggcagcagcccucucucgguccagcucuuuggcuugcuuuagucuuaguaauggguggaauaugacgguaauguuucuggcuccagguuugcagacaaauuuuguuccuccaccuucaauuaaguugucaucaggacccccuugcaguucuccacuccgacuauagagcucccuucucuguucucgcagauaggcgcucauacugauggcaugggaggacgauucgaacuugaaaagagaauuuuuuggccuuugagguuucuucuuggcaaaaaaggcugcaaacucucguccagugcuggcauagcuuaguugagcugaugguucagaggccguacgaguauuuuucauauccaaguacucaguuaauagcaucuguagaacaucuuggaucuucacccauacaucugccauaucauacaguuugauaucuuccugcugagucaguggagucacuacaguguccugcagguaucccaggaccacagagugugcagcggcuacagcauuaaacuugucaaacaguaacuccagcaguucuagaagcaaccuugguugguucuccacaguaacguucuccccccgcugauagccacugucugccaccuggguuguagaccucuucacaauuugcuucaacuccugcuccaagcgcucuaugauugccuuaacuguuucugggaucuucuucaguuucgccaagcccuuaaugaggauacccauaaacagggugcuguuuuccucuggauccaauucuaaaucuuccuugauguccugcagauuuaucucccucacacuugagcuuccagcaguagaauagugagagguaucaaggaauuuucgaggaguagggagguuuguaacaucaaucagaggaacagaagcaucuuucacgagggagcugauuuucccuuuuuccuuguuacgcugcacaacucggcuagucgauuugauguacaggugccgguguaguucaucuaugagaaccaagugaagguucaucuucuugcugugaagcucuagucgaaggucacucaguccuuccaccuggagcagggggcccuccaaagacucaacugcugacaccaacaugucaguggcacugagauagugcuugcuggccaugcacuguuccagcuuuugaggcacuugcuugauauucucaauuucauccaacaaguucaggacaugcuuaugcucaauuccuucaauccacaguuuccgaagcucaucccguuugcagugcagcagcaucuugcaugaaagcagguucucuuuuaccugcuuuauuuuauuucgggaguuagugaugcgcucugugaugcucugguaugugcgaauggcugucgucaauucuguguagugcuguacaaucaauucauccaggucacggucacauuucucguaggcuucuucaaggcgacccuuuucauuuucccugucuucgacaucgucacuaguagacagaguccugaucacagagaugagcagccccgaggggucuuugcuuuugcugacugugcuucuguauuucccaccagcugcuucugccgccaucuuggacgcggggagagccgcuaggcuccaaggaa

SEQ ID NO: 2145 - RNA, 2231 nt, Homo sapiens
ugccagucuuugucagaaaauauauuuauuauugauagugagugaaguaaagaugugaguauucacuauagagguuuuaucagccaagguugccuucauauugauaaaaauaccuuaucucacuuguaaucauaaacauuauuccaguagaagagguacauuuucucuccuuuuugucuucuugccuguauaaucaccauaauaaguuauaaugaaauagcucuuacauaaucaaaggagaaaagaaagacaaaaccaacaugccacagccuagacaauuccauccagcacugcugccuccagaucuguuuucuggcucucuccacccagcacugcugcccucggaucuauguuuucuggcucucuccucgccccacuccaauuaauuuagcccccaaccccauccuacuuuguuaggguggagguucaccaaaugauggggcuuguucagaagagaaacauuuuauggucagugcaaguugaauagaaaguaccaaaagguggagagggcugcccuucucuuuuaaucaucauaagaggguuuacuaauacucaagaguguccuuuaaugacugaucccugaucaaggcuuuggcccuucaaacugcugcuguucaaaacgugaaaugauucugcugaauccauucuugaugucucucuuuaguggucuucucauuaguggucuucucuucaaauggguuguuuucucacuaggaaaaaaaauguuccaucucuggaauuaacguugaugguguuuugcucauucugaaaguuuuuauccucccuucucaagcaugcucuguuuggcaugauugacacagugcauauacuggguggccagagcggagcauuugagggucugguggguguucucacgguaacacugaagaauuuuggccugcagaucagcacagacuggaugagacucauaucgcuugaacuuugcuuccaccucuucagcagcuuucugauauuguucaguggugacucuguagaacucugagcucuguagaacaucuuggaucuucacccauacaucugccauaucauacaguuugauaucuuccugcugagucaguggagucacuacaguguccugcagguaucccaggaccacagagugugcagcggcuacagcauuaaacuugucaaacaguaacuccagcaguucuagaagcaaccuugguugguucuccacaguaacguucuccccccgcugauagccacugucugccaccuggguuguagaccucuucacaauuugcuucaacuccugcuccaagcgcucuaugauugccuuaacuguuucugggaucuucuucaguuucgccaagcccuuaaugaggauacccauaaacagggugcuguuuuccucuggauccaauucuaaaucuuccuugauguccugcagauuuaucucccucacacuugagcuuccagcaguagaauagugagagguaucaaggaauuuucgaggaguagggagguuuguaacaucaaucagaggaacagaagcaucuuucacgagggagcugauuuucccuuuuuccuuguuacgcugcacaacucggcuagucgauuugauguacaggugccgguguaguucaucuaugagaaccaagugaagguucaucuucuugcugugaagcucuagucgaaggucacucaguccuuccaccuggagcagggggcccuccaaagacucaacugcugacaccaacaugucaguggcacugagauagugcuugcuggccaugcacuguuccagcuuuugaggcacuugcuugauauucucaauuucauccaacaaguucaggacaugcuuaugcucaauuccuucaauccacaguuuccgaagcucaucccguuugcagugcagcagcaucuugcaugaaagcagguucucuuuuaccugcuuuauuuuauuucgggaguuagugaugcgcucugugaugcucugguaugugcgaauggcugucgucaauucuguguagugcuguacaaucaauucauccaggucacggucacauuucucguaggcuucuucaaggcgacccuuuucauuuucccugucuucgacaucgucacuaguagacagaguccuuuacaccugguuuucucuaccaaacccaaauagcgugcuuuggggucccgagacuguaauagaaggugcugccccuaaagaaaagacugaggcggggcuccucucucuauagcuaaccccagaaaaa

SEQ ID NO: 2146 - RNA, 1939 nt, Homo sapiens
cuuucuuggucuaccaccucuauucuggcuucacuauuugcccaugcaaccgggaccccagauuugucacugaagaaacugauucauuacgcauggacuuccuuucauguucucuguuugcagcuggucauggguuggucuuucagagaagugacuaagguaaagaaugggagagacuagaaaugagccuucuucuuagaaaguuuuaguguuucccaauugccuagugaacuaggaaaaucccccucacucuucaguucaaaguucuccauuccauggucccauuuucccuguccagugaguucccaacugugcuccaaugaggacuaaagguuccgaggaguaacaucuggguuucuaggaaggccgaaguggaggcuaagcagucaacacuccagguuucacccagagcagcuccacuuuuaucaggugcuuugccuuagcgcguuccuccucgcuacauauccucucccgaaggauggcucugguuaacugcucauuggcagcagcccucucucgguccagcucuuuggcuugcuuuagucguuucugaucuucggauucuuucuuggcuugcuccaaugccagcuccucagcuacucuucuuuucaauucuucaucagaaacugaggcaccauaagcaccagaauaccgcugagacuucgaaccagauggagaggauuccuucauucgaucaaucacauuuuccgaaagcuguagaacaucuuggaucuucacccauacaucugccauaucauacaguuugauaucuuccugcugagucaguggagucacuacaguguccugcagguaucccaggaccacagagugugcagcggcuacagcauuaaacuugucaaacaguaacuccagcaguucuagaagcaaccuugguugguucuccacaguaacguucuccccccgcugauagccacugucugccaccuggguuguagaccucuucacaauuugcuucaacuccugcuccaagcgcucuaugauugccuuaacuguuucugggaucuucuucaguuucgccaagcccuuaaugaggauacccauaaacagggugcuguuuuccucuggauccaauucuaaaucuuccuugauguccugcagauuuaucucccucacacuugagcuuccagcaguagaauagugagagguaucaaggaauuuucgaggaguagggagguuuguaacaucaaucagaggaacagaagcaucuuucacgagggagcugauuuucccuuuuuccuuguuacgcugcacaacucggcuagucgauuugauguacaggugccgguguaguucaucuaugagaaccaagugaagguucaucuucuugcugugaagcucuagucgaaggucacucaguccuuccaccuggagcagggggcccuccaaagacucaacugcugacaccaacaugucaguggcacugagauagugcuugcuggccaugcacuguuccagcuuuugaggcacuugcuugauauucucaauuucauccaacaaguucaggacaugcuuaugcucaauuccuucaauccacaguuuccgaagcucaucccguuugcagugcagcagcaucuugcaugaaagcagguucucuuuuaccugcuuuauuuuauuucgggaguuagugaugcgcucugugaugcucugguaugugcgaauggcugucgucaauucuguguagugcuguacaaucaauucauccaggucacggucacauuucucguaggcuucuucaaggcgacccuuuucauuuucccugucuucgacaucgucacuaguagacagaguccuuuacaccugguuuucucuaccaaacccaaauagcgugcuuuggggucccgagacuguaauagaaggugcugccccuaaagaaaagacugaggcggggcuccucucucuauagcuaaccccagaaaaa

SEQ ID NO: 2147 - RNA, 2101 nt, Homo sapiens
cuuucuuggucuaccaccucuauucuggcuucacuauuugcccaugcaaccgggaccccagauuugucacugaagaaacugauucauuacgcauggacuuccuuucauguucucuguuugcagcuggucauggguuggucuuucagagaagugacuaagguaaagaaugggagagacuagaaaugagccuucuucuuagaaaguuuuaguguuucccaauugccuagugaacuaggaaaaucccccucacucuucaguucaaaguucuccauuccauggucccauuuucccuguccagugaguucccaacugugcuccaaugaggacuaaagguuccgaggaguaacaucuggguuucuaggaaggccgaaguggaggcuaagcagucaacacuccagguuucacccagagcagcuccacuuuuaucaggugcuuugccuuagcgcguuccuccucgcuacauauccucucccgaaggauggcucugguuaacugcucauuggcagcagcccucucucgguccagcucuuuggcuugcuuuagucuuaguaauggguggaauaugacgguaauguuucuggcuccagguuugcagacaaauuuuguuccuccaccuucaauuaaguugucaucaggacccccuugcaguucuccacuccgacuauagagcucccuucucuguucucgcagauaggcgcucauacugauggcaugggaggacgauucgaacuugaaaagagaauuuuuuggccuuugagguuucuucuuggcaaaaaaggcugcaaacucucguccagugcuggcauagcuuaguugagcugaugguucagaggccguacgaguauuuuucauauccaaguacucaguuaauagcaucuguagaacaucuuggaucuucacccauacaucugccauaucauacaguuugauaucuuccugcugagucaguggagucacuacaguguccugcagguaucccaggaccacagagugugcagcggcuacagcauuaaacuugucaaacaguaacuccagcaguucuagaagcaaccuugguugguucuccacaguaacguucuccccccgcugauagccacugucugccaccuggguuguagaccucuucacaauuugcuucaacuccugcuccaagcgcucuaugauugccuuaacuguuucugggaucuucuucaguuucgccaagcccuuaaugaggauacccauaaacagggugcuguuuuccucuggauccaauucuaaaucuuccuugauguccugcagauuuaucucccucacacuugagcuuccagcaguagaauagugagagguaucaaggaauuuucgaggaguagggagguuuguaacaucaaucagaggaacagaagcaucuuucacgagggagcugauuuucccuuuuuccuuguuacgcugcacaacucggcuagucgauuugauguacaggugccgguguaguucaucuaugagaaccaagugaagguucaucuucuugcugugaagcucuagucgaaggucacucaguccuuccaccuggagcagggggcccuccaaagacucaacugcugacaccaacaugucaguggcacugagauagugcuugcuggccaugcacuguuccagcuuuugaggcacuugcuugauauucucaauuucauccaacaaguucaggacaugcuuaugcucaauuccuucaauccacaguuuccgaagcucaucccguuugcagugcagcagcaucuugcaugaaagcagguucucuuuuaccugcuuuauuuuauuucgggaguuagugaugcgcucugugaugcucugguaugugcgaauggcugucgucaauucuguguagugcuguacaaucaauucauccaggucacggucacauuucucguaggcuucuucaaggcgacccuuuucauuuucccugucuucgacaucgucacuaguagacagaguccuuuacaccugguuuucucuaccaaacccaaauagcgugcuuuggggucccgagacuguaauagaaggugcugccccuaaagaaaagacugaggcggggcuccucucucuauagcuaaccccagaaaaa

SEQ ID NO: 2148 - RNA, 2315 nt, Homo sapiens
ugccagucuuugucagaaaauauauuuauuauugauagugagugaaguaaagaugugaguauucacuauagagguuuuaucagccaagguugccuucauauugauaaaaauaccuuaucucacuuguaaucauaaacauuauuccaguagaagagguacauuuucucuccuuuuugucuucuugccuguauaaucaccauaauaaguuauaaugaaauagcucuuacauaaucaaaggagaaaagaaagacaaaaccaacaugccacagccuagacaauuccauccagcacugcugccuccagaucuguuuucuggcucucuccacccagcacugcugcccucggaucuauguuuucuggcucucuccucgccccacuccaauuaauuuagcccccaaccccauccuacuuuguuaggguggagguucaccaaaugauggggcuuguucagaagagaaacauuuuauggucagugcaaguugaauagaaaguaccaaaagguggagagggcugcccuucucuuuuaaucaucauaagaggguuuacuaauacucaagaguguccuuuaaugacugaucccugaucaaggcuuuggcccuucaaacugcugcuguucaaaacgugaaaugauucugcugaauccauucuugaugucucucuuuaguggucuucucauuaguggucuucucuucaaauggguuguuuucucacuaggaaaaaaaauguuccaucucuggaauuaacguugaugguguuuugcucauucugaaaguuuuuauccucccuucucaagcaugcucuguuuggcaugauugacacagugcauauacuggguggccagagcggagcauuugagggucugguggguguucucacgguaacacugaagaauuuuggccugcagaucagcacagacuggaugagacucauaucgcuugaacuuugcuuccaccucuucagcagcuuucugauauuguucaguggugacucuguagaacucugagcuccucuccuccagucuagccagcuguucuuuguagaaugcauccugcuucuuuagcacucggucuuucucuuccagcugccuagccuguagaacaucuuggaucuucacccauacaucugccauaucauacaguuugauaucuuccugcugagucaguggagucacuacaguguccugcagguaucccaggaccacagagugugcagcggcuacagcauuaaacuugucaaacaguaacuccagcaguucuagaagcaaccuugguugguucuccacaguaacguucuccccccgcugauagccacugucugccaccuggguuguagaccucuucacaauuugcuucaacuccugcuccaagcgcucuaugauugccuuaacuguuucugggaucuucuucaguuucgccaagcccuuaaugaggauacccauaaacagggugcuguuuuccucuggauccaauucuaaaucuuccuugauguccugcagauuuaucucccucacacuugagcuuccagcaguagaauagugagagguaucaaggaauuuucgaggaguagggagguuuguaacaucaaucagaggaacagaagcaucuuucacgagggagcugauuuucccuuuuuccuuguuacgcugcacaacucggcuagucgauuugauguacaggugccgguguaguucaucuaugagaaccaagugaagguucaucuucuugcugugaagcucuagucgaaggucacucaguccuuccaccuggagcagggggcccuccaaagacucaacugcugacaccaacaugucaguggcacugagauagugcuugcuggccaugcacuguuccagcuuuugaggcacuugcuugauauucucaauuucauccaacaaguucaggacaugcuuaugcucaauuccuucaauccacaguuuccgaagcucaucccguuugcagugcagcagcaucuugcaugaaagcagguucucuuuuaccugcuuuauuuuauuucgggaguuagugaugcgcucugugaugcucugguaugugcgaauggcugucgucaauucuguguagugcuguacaaucaauucauccaggucacggucacauuucucguaggcuucuucaaggcgacccuuuucauuuucccugucuucgacaucgucacuaguagacagaguccuuuacaccugguuuucucuaccaaacccaaauagcgugcuuuggggucccgagacuguaauagaaggugcugccccuaaagaaaagacugaggcggggcuccucucucuauagcuaaccccagaaaaa

SEQ ID NO: 2149 - RNA, 2307 nt, Homo sapiens
ugccagucuuugucagaaaauauauuuauuauugauagugagugaaguaaagaugugaguauucacuauagagguuuuaucagccaagguugccuucauauugauaaaaauaccuuaucucacuuguaaucauaaacauuauuccaguagaagagguacauuuucucuccuuuuugucuucuugccuguauaaucaccauaauaaguuauaaugaaauagcucuuacauaaucaaaggagaaaagaaagacaaaaccaacaugccacagccuagacaauuccauccagcacugcugccuccagaucuguuuucuggcucucuccacccagcacugcugcccucggaucuauguuuucuggcucucuccucgccccacuccaauuaauuuagcccccaaccccauccuacuuuguuaggguggagguucaccaaaugauggggcuuguucagaagagaaacauuuuauggucagugcaaguugaauagaaaguaccaaaagguggagagggcugcccuucucuuuuaaucaucauaagaggguuuacuaauacucaagaguguccuuuaaugacugaucccugaucaaggcuuuggcccuucaaacugcugcuguucaaaacgugaaaugauucugcugaauccauucuugaugucucucuuuaguggucuucucauuaguggucuucucuucaaauggguuguuuucucacuaggaaaaaaaauguuccaucucuggaauuaacguugaugguguuuugcucauucugaaaguuuuuauccucccuucucaagcaugcucuguuuggcaugauugacacagugcauauacuggguggccagagcggagcauuugagggucugguggguguucucacgguaacacugaagaauuuuggccugcagaucagcacagacuggaugagacucauaucgcuugaacuuugcuuccaccucuucagcagcuuucugauauuguucaguggugacucuguagaacucugagcuccucuccuccagucuagccagcuguucuuuguagaaugcauccugcuucuuuagcacucggucuuucucuuccagcugccuagccuguagaacaucuuggaucuucacccauacaucugccauaucauacaguuugauaucuuccugcugagucaguggagucacuacaguguccugcagguaucccaggaccacagagugugcagcggcuacagcauuaaacuugucaaacaguaacuccagcaguucuagaagcaaccuugguugguucuccacaguaacguucuccccccgcugauagccacugucugccaccuggguuguagaccucuucacaauuugcuucaacuccugcuccaagcgcucuaugauugccuuaacuguuucugggaucuucuucaguuucgccaagcccuuaaugaggauacccauaaacagggugcuguuuuccucuggauccaauucuaaaucuuccuugauguccugcagauuuaucucccucacacuugagcuuccagcaguagaauagugagagguaucaaggaauuuucgaggaguagggagguuuguaacaucaaucagaggaacagaagcaucuuucacgagggagcugauuuucccuuuuuccuuguuacgcugcacaacucggcuagucgauuugauguacaggugccgguguaguucaucuaugagaaccaagugaagguucaucuucuugcugugaagcucuagucgaaggucacucaguccuuccaccuggagcagggggcccuccaaagacucaacugcugacaccaacaugucaguggcacugagauagugcuugcuggccaugcacuguuccagcuuuugaggcacuugcuugauauucucaauuucauccaacaaguucaggacaugcuuaugcucaauuccuucaauccacaguuuccgaagcucaucccguuugcagugcagcagcaucuugcaugaaagcagguucucuuuuaccugcuuuauuuuauuucgggaguuagugaugcgcucugugaugcucugguaugugcgaauggcugucgucaauucuguguagugcuguacaaucaauucauccaggucacggucacauuucucguaggcuucuucaaggcgacccuuuucauuuucccugucuucgacaucgucacuaguagacagaguccugaucacagagaugagcagccccgaggggucuuugcuuuugcugacugugcuucuguauuucccaccagcugcuucugccgccaucuuggacgcggggagagccgcuaggcuccaaggaa

SEQ ID NO: 2150 - RNA, 2223 nt, Homo sapiens
ugccagucuuugucagaaaauauauuuauuauugauagugagugaaguaaagaugugaguauucacuauagagguuuuaucagccaagguugccuucauauugauaaaaauaccuuaucucacuuguaaucauaaacauuauuccaguagaagagguacauuuucucuccuuuuugucuucuugccuguauaaucaccauaauaaguuauaaugaaauagcucuuacauaaucaaaggagaaaagaaagacaaaaccaacaugccacagccuagacaauuccauccagcacugcugccuccagaucuguuuucuggcucucuccacccagcacugcugcccucggaucuauguuuucuggcucucuccucgccccacuccaauuaauuuagcccccaaccccauccuacuuuguuaggguggagguucaccaaaugauggggcuuguucagaagagaaacauuuuauggucagugcaaguugaauagaaaguaccaaaagguggagagggcugcccuucucuuuuaaucaucauaagaggguuuacuaauacucaagaguguccuuuaaugacugaucccugaucaaggcuuuggcccuucaaacugcugcuguucaaaacgugaaaugauucugcugaauccauucuugaugucucucuuuaguggucuucucauuaguggucuucucuucaaauggguuguuuucucacuaggaaaaaaaauguuccaucucuggaauuaacguugaugguguuuugcucauucugaaaguuuuuauccucccuucucaagcaugcucuguuuggcaugauugacacagugcauauacuggguggccagagcggagcauuugagggucugguggguguucucacgguaacacugaagaauuuuggccugcagaucagcacagacuggaugagacucauaucgcuugaacuuugcuuccaccucuucagcagcuuucugauauuguucaguggugacucuguagaacucugagcucuguagaacaucuuggaucuucacccauacaucugccauaucauacaguuugauaucuuccugcugagucaguggagucacuacaguguccugcagguaucccaggaccacagagugugcagcggcuacagcauuaaacuugucaaacaguaacuccagcaguucuagaagcaaccuugguugguucuccacaguaacguucuccccccgcugauagccacugucugccaccuggguuguagaccucuucacaauuugcuucaacuccugcuccaagcgcucuaugauugccuuaacuguuucugggaucuucuucaguuucgccaagcccuuaaugaggauacccauaaacagggugcuguuuuccucuggauccaauucuaaaucuuccuugauguccugcagauuuaucucccucacacuugagcuuccagcaguagaauagugagagguaucaaggaauuuucgaggaguagggagguuuguaacaucaaucagaggaacagaagcaucuuucacgagggagcugauuuucccuuuuuccuuguuacgcugcacaacucggcuagucgauuugauguacaggugccgguguaguucaucuaugagaaccaagugaagguucaucuucuugcugugaagcucuagucgaaggucacucaguccuuccaccuggagcagggggcccuccaaagacucaacugcugacaccaacaugucaguggcacugagauagugcuugcuggccaugcacuguuccagcuuuugaggcacuugcuugauauucucaauuucauccaacaaguucaggacaugcuuaugcucaauuccuucaauccacaguuuccgaagcucaucccguuugcagugcagcagcaucuugcaugaaagcagguucucuuuuaccugcuuuauuuuauuucgggaguuagugaugcgcucugugaugcucugguaugugcgaauggcugucgucaauucuguguagugcuguacaaucaauucauccaggucacggucacauuucucguaggcuucuucaaggcgacccuuuucauuuucccugucuucgacaucgucacuaguagacagaguccugaucacagagaugagcagccccgaggggucuuugcuuuugcugacugugcuucuguauuucccaccagcugcuucugccgccaucuuggacgcggggagagccgcuaggcuccaaggaa

SEQ ID NO: 2151 - RNA, 1583 nt, Homo sapiens
ugccagucuuugucagaaaauauauuuauuauugauagugagugaaguaaagaugugaguauucacuauagagguuuuaucagccaagguugccuucauauugauaaaaauaccuuaucucacuuguaaucauaaacauuauuccaguagaagagguacauuuucucuccuuuuugucuucuugccuguauaaucaccauaauaaguuauaaugaaauagcucuuacauaaucaaaggagaaaagaaagacaaaaccaacaugccacagccuagacaauuccauccagcacugcugccuccagaucuguuuucuggcucucuccacccagcacugcugcccucggaucuauguuuucuggcucucuccucgccccacuccaauuaauuuagcccccaaccccauccuacuuuguuaggguggagguucaccaaaugauggggcuuguucagaagagaaacauuuuauggucagugcaaguugaauagaaaguaccaaaagguggagagggcugcccuucucuuuuaaucaucauaagaggguuuacuaauacucaagaguguccuuuaaugacugaucccugaucaaggcuuuggcccuucaaacugcugcuguucaaaacgugaaaugauucugcugaauccauucuugaugucucucuuuaguggucuucucauuaguggucuucucuucaaauggguuguuuucucacuaggaaaaaaaauguuccaucucuggaauuaacguugaugguguuuugcucauucugaaaguuuuuauccucccuucucaagcaugcucuguuuggcaugauugacacagugcauauacuggguggccagagcggagcauuugagggucugguggguguucucacgguaacacugaagaauuuuggccugcagaucagcacagacuggaugagacucauaucgcuugaacuuugcuuccaccucuucagcagcuuucugauauuguucaguggugacucuguagaacucugagcuccucuccuccagucuagccagcuguucuuuguagaaugcauccugcuucuuuagcacucggucuuucucuuccagcugccuagcuuugucuucaauauccaggugcuuugccuuagcgcguuccuccucgcuacauauccucucccgaaggauggcucugguuaacugcucauuggcagcagcccucucucgguccagcucuuuggcuugcuuuagucuuaguaauggguggaauaugacgguaauguuucuggcuccagguuugcagacaaauuuuguuccuccaccuucaauuaaguugucaucaggaccccccgaugaauucaucuuaaaacagaugaauuaauuggcccuaaaucucgaggaguucaguaaaacuugccaugcacagaagggcugucuggguguaaaagccucacaguuaccucuccaauaguacccuguagaccaauauccucuaucuccauguuggcaacaagucuucauugagaugguuucacggcucccauugcucacuucugauuguuucuuuuucaacugagugagaucacauuuagcaauagcuaggugguuaucu

SEQ ID NO: 2152 - RNA, 2595 nt, Homo sapiens
ugccagucuuugucagaaaauauauuuauuauugauagugagugaaguaaagaugugaguauucacuauagagguuuuaucagccaagguugccuucauauugauaaaaauaccuuaucucacuuguaaucauaaacauuauuccaguagaagagguacauuuucucuccuuuuugucuucuugccuguauaaucaccauaauaaguuauaaugaaauagcucuuacauaaucaaaggagaaaagaaagacaaaaccaacaugccacagccuagacaauuccauccagcacugcugccuccagaucuguuuucuggcucucuccacccagcacugcugcccucggaucuauguuuucuggcucucuccucgccccacuccaauuaauuuagcccccaaccccauccuacuuuguuaggguggagguucaccaaaugauggggcuuguucagaagagaaacauuuuauggucagugcaaguugaauagaaaguaccaaaagguggagagggcugcccuucucuuuuaaucaucauaagaggguuuacuaauacucaagaguguccuuuaaugacugaucccugaucaaggcuuuggcccuucaaacugcugcuguucaaaacgugaaaugauucugcugaauccauucuugaugucucucuuuaguggucuucucauuaguggucuucucuucaaauggguuguuuucucacuaggaaaaaaaauguuccaucucuggaauuaacguugaugguguuuugcucauucugaaaguuuuuauccucccuucucaagcaugcucuguuuggcaugauugacacagugcauauacuggguggccagagcggagcauuugagggucugguggguguucucacgguaacacugaagaauuuuggccugcagaucagcacagacuggaugagacucauaucgcuugaacuuugcuuccaccucuucagcagcuuucugauauuguucaguggugacucuguagaacucugagcuccucuccuccagucuagccagcuguucuuuguagaaugcauccugcuucuuuagcacucggucuuucucuuccagcugccuagccaggugcuuugccuuagcgcguuccuccucgcuacauauccucucccgaaggauggcucugguuaacugcucauuggcagcagcccucucucgguccagcucuuuggcuugcuuuagucguuucugaucuucggauucuuucuuggcuugcuccaaugccagcuccucagcuacucuucuuuucaauucuucaucagaaacugaggcaccauaagcaccagaauaccgcugagacuucgaaccagauggagaggauuccuucauucgaucaaucacauuuuccgaaagcuguagaacaucuuggaucuucacccauacaucugccauaucauacaguuugauaucuuccugcugagucaguggagucacuacaguguccugcagguaucccaggaccacagagugugcagcggcuacagcauuaaacuugucaaacaguaacuccagcaguucuagaagcaaccuugguugguucuccacaguaacguucuccccccgcugauagccacugucugccaccuggguuguagaccucuucacaauuugcuucaacuccugcuccaagcgcucuaugauugccuuaacuguuucugggaucuucuucaguuucgccaagcccuuaaugaggauacccauaaacagggugcuguuuuccucuggauccaauucuaaaucuuccuugauguccugcagauuuaucucccucacacuugagcuuccagcaguagaauagugagagguaucaaggaauuuucgaggaguagggagguuuguaacaucaaucagaggaacagaagcaucuuucacgagggagcugauuuucccuuuuuccuuguuacgcugcacaacucggcuagucgauuugauguacaggugccgguguaguucaucuaugagaaccaagugaagguucaucuucuugcugugaagcucuagucgaaggucacucaguccuuccaccuggagcagggggcccuccaaagacucaacugcugacaccaacaugucaguggcacugagauagugcuugcuggccaugcacuguuccagcuuuugaggcacuugcuugauauucucaauuucauccaacaaguucaggacaugcuuaugcucaauuccuucaauccacaguuuccgaagcucaucccguuugcagugcagcagcaucuugcaugaaagcagguucucuuuuaccugcuuuauuuuauuucgggaguuagugaugcgcucugugaugcucugguaugugcgaauggcugucgucaauucuguguagugcuguacaaucaauucauccaggucacggucacauuucucguaggcuucuucaaggcgacccuuuucauuuucccugucuucgacaucgucacuaguagacagaguccugaucacagagaugagcagccccgaggggucuuugcuuuugcugacugugcuucuguauuucccaccagcugcuucugccgccaucuuggacgcggggagagccgcuaggcuccaaggaa

SEQ ID NO: 2153 - RNA, 2610 nt, Homo sapiens
ugccagucuuugucagaaaauauauuuauuauugauagugagugaaguaaagaugugaguauucacuauagagguuuuaucagccaagguugccuucauauugauaaaaauaccuuaucucacuuguaaucauaaacauuauuccaguagaagagguacauuuucucuccuuuuugucuucuugccuguauaaucaccauaauaaguuauaaugaaauagcucuuacauaaucaaaggagaaaagaaagacaaaaccaacaugccacagccuagacaauuccauccagcacugcugccuccagaucuguuuucuggcucucuccacccagcacugcugcccucggaucuauguuuucuggcucucuccucgccccacuccaauuaauuuagcccccaaccccauccuacuuuguuaggguggagguucaccaaaugauggggcuuguucagaagagaaacauuuuauggucagugcaaguugaauagaaaguaccaaaagguggagagggcugcccuucucuuuuaaucaucauaagaggguuuacuaauacucaagaguguccuuuaaugacugaucccugaucaaggcuuuggcccuucaaacugcugcuguucaaaacgugaaaugauucugcugaauccauucuugaugucucucuuuaguggucuucucauuaguggucuucucuucaaauggguuguuuucucacuaggaaaaaaaauguuccaucucuggaauuaacguugaugguguuuugcucauucugaaaguuuuuauccucccuucucaagcaugcucuguuuggcaugauugacacagugcauauacuggguggccagagcggagcauuugagggucugguggguguucucacgguaacacugaagaauuuuggccugcagaucagcacagacuggaugagacucauaucgcuugaacuuugcuuccaccucuucagcagcuuucugauauuguucaguggugacucuguagaacucugagcuccucuccuccagucuagccagcuguucuuuguagaaugcauccugcuucuuuagcacucggucuuucucuuccagcugccuagcuuugucuucaauauccaggugcuuugccuuagcgcguuccuccucgcuacauauccucucccgaaggauggcucugguuaacugcucauuggcagcagcccucucucgguccagcucuuuggcuugcuuuagucguuucugaucuucggauucuuucuuggcuugcuccaaugccagcuccucagcuacucuucuuuucaauucuucaucagaaacugaggcaccauaagcaccagaauaccgcugagacuucgaaccagauggagaggauuccuucauucgaucaaucacauuuuccgaaagcuguagaacaucuuggaucuucacccauacaucugccauaucauacaguuugauaucuuccugcugagucaguggagucacuacaguguccugcagguaucccaggaccacagagugugcagcggcuacagcauuaaacuugucaaacaguaacuccagcaguucuagaagcaaccuugguugguucuccacaguaacguucuccccccgcugauagccacugucugccaccuggguuguagaccucuucacaauuugcuucaacuccugcuccaagcgcucuaugauugccuuaacuguuucugggaucuucuucaguuucgccaagcccuuaaugaggauacccauaaacagggugcuguuuuccucuggauccaauucuaaaucuuccuugauguccugcagauuuaucucccucacacuugagcuuccagcaguagaauagugagagguaucaaggaauuuucgaggaguagggagguuuguaacaucaaucagaggaacagaagcaucuuucacgagggagcugauuuucccuuuuuccuuguuacgcugcacaacucggcuagucgauuugauguacaggugccgguguaguucaucuaugagaaccaagugaagguucaucuucuugcugugaagcucuagucgaaggucacucaguccuuccaccuggagcagggggcccuccaaagacucaacugcugacaccaacaugucaguggcacugagauagugcuugcuggccaugcacuguuccagcuuuugaggcacuugcuugauauucucaauuucauccaacaaguucaggacaugcuuaugcucaauuccuucaauccacaguuuccgaagcucaucccguuugcagugcagcagcaucuugcaugaaagcagguucucuuuuaccugcuuuauuuuauuucgggaguuagugaugcgcucugugaugcucugguaugugcgaauggcugucgucaauucuguguagugcuguacaaucaauucauccaggucacggucacauuucucguaggcuucuucaaggcgacccuuuucauuuucccugucuucgacaucgucacuaguagacagaguccugaucacagagaugagcagccccgaggggucuuugcuuuugcugacugugcuucuguauuucccaccagcugcuucugccgccaucuuggacgcggggagagccgcuaggcuccaaggaa

SEQ ID NO: 2154 - RNA, 941 nt, Homo sapiens
cuuucuuggucuaccaccucuauucuggcuucacuauuugcccaugcaaccgggaccccagauuugucacugaagaaacugauucauuacgcauggacuuccuuucauguucucuguuugcagcuggucauggguuggucuuucagagaagugacuaagguaaagaaugggagagacuagaaaugagccuucuucuuagaaaguuuuaguguuucccaauugccuagugaacuaggaaaaucccccucacucuucaguucaaaguucuccauuccauggucccauuuucccuguccagugaguucccaacugugcuccaaugaggacuaaagguuccgaggaguaacaucuggguuucuaggaaggccgaaguggaggcuaagcagucaacacuccagguuucacccagagcagcuccacuuuuaucaggugcuuugccuuagcgcguuccuccucgcuacauauccucucccgaaggauggcucugguuaacugcucauuggcagcagcccucucucgguccagcucuuuggcuugcuuuagucuuaguaauggguggaauaugacgguaauguuucuggcuccagguuugcagacaaauuuuguuccuccaccuucaauuaaguugucaucaggacccccucuccaauaguacccuguagaccaauauccucuaucuccauguuggcaacaagucuucauugagaugguuucacggcucccauugcucacuucugauuguuucuuuuucaacugagugagaucacauuuagcaauagcuaggugguuaucucuacccccuugagaaauccgcuuuauagaucugggauuauugggauccucuccuuugcucauuuugguuuugcuugcuguuacuaaauuggccauguaagaaaacguuuuaaauaaaucaaaugcaaccgacagaugcccucuauaaa

SEQ ID NO: 2155 - RNA, 1931 nt, Homo sapiens
cuuucuuggucuaccaccucuauucuggcuucacuauuugcccaugcaaccgggaccccagauuugucacugaagaaacugauucauuacgcauggacuuccuuucauguucucuguuugcagcuggucauggguuggucuuucagagaagugacuaagguaaagaaugggagagacuagaaaugagccuucuucuuagaaaguuuuaguguuucccaauugccuagugaacuaggaaaaucccccucacucuucaguucaaaguucuccauuccauggucccauuuucccuguccagugaguucccaacugugcuccaaugaggacuaaagguuccgaggaguaacaucuggguuucuaggaaggccgaaguggaggcuaagcagucaacacuccagguuucacccagagcagcuccacuuuuaucaggugcuuugccuuagcgcguuccuccucgcuacauauccucucccgaaggauggcucugguuaacugcucauuggcagcagcccucucucgguccagcucuuuggcuugcuuuagucguuucugaucuucggauucuuucuuggcuugcuccaaugccagcuccucagcuacucuucuuuucaauucuucaucagaaacugaggcaccauaagcaccagaauaccgcugagacuucgaaccagauggagaggauuccuucauucgaucaaucacauuuuccgaaagcuguagaacaucuuggaucuucacccauacaucugccauaucauacaguuugauaucuuccugcugagucaguggagucacuacaguguccugcagguaucccaggaccacagagugugcagcggcuacagcauuaaacuugucaaacaguaacuccagcaguucuagaagcaaccuugguugguucuccacaguaacguucuccccccgcugauagccacugucugccaccuggguuguagaccucuucacaauuugcuucaacuccugcuccaagcgcucuaugauugccuuaacuguuucugggaucuucuucaguuucgccaagcccuuaaugaggauacccauaaacagggugcuguuuuccucuggauccaauucuaaaucuuccuugauguccugcagauuuaucucccucacacuugagcuuccagcaguagaauagugagagguaucaaggaauuuucgaggaguagggagguuuguaacaucaaucagaggaacagaagcaucuuucacgagggagcugauuuucccuuuuuccuuguuacgcugcacaacucggcuagucgauuugauguacaggugccgguguaguucaucuaugagaaccaagugaagguucaucuucuugcugugaagcucuagucgaaggucacucaguccuuccaccuggagcagggggcccuccaaagacucaacugcugacaccaacaugucaguggcacugagauagugcuugcuggccaugcacuguuccagcuuuugaggcacuugcuugauauucucaauuucauccaacaaguucaggacaugcuuaugcucaauuccuucaauccacaguuuccgaagcucaucccguuugcagugcagcagcaucuugcaugaaagcagguucucuuuuaccugcuuuauuuuauuucgggaguuagugaugcgcucugugaugcucugguaugugcgaauggcugucgucaauucuguguagugcuguacaaucaauucauccaggucacggucacauuucucguaggcuucuucaaggcgacccuuuucauuuucccugucuucgacaucgucacuaguagacagaguccugaucacagagaugagcagccccgaggggucuuugcuuuugcugacugugcuucuguauuucccaccagcugcuucugccgccaucuuggacgcggggagagccgcuaggcuccaaggaa

SEQ ID NO: 2156 - RNA, 1620 nt, Homo sapiens
ugccagucuuugucagaaaauauauuuauuauugauagugagugaaguaaagaugugaguauucacuauagagguuuuaucagccaagguugccuucauauugauaaaaauaccuuaucucacuuguaaucauaaacauuauuccaguagaagagguacauuuucucuccuuuuugucuucuugccuguauaaucaccauaauaaguuauaaugaaauagcucuuacauaaucaaaggagaaaagaaagacaaaaccaacaugccacagccuagacaauuccauccagcacugcugccuccagaucuguuuucuggcucucuccacccagcacugcugcccucggaucuauguuuucuggcucucuccucgccccacuccaauuaauuuagcccccaaccccauccuacuuuguuaggguggagguucaccaaaugauggggcuuguucagaagagaaacauuuuauggucagugcaaguugaauagaaaguaccaaaagguggagagggcugcccuucucuuuuaaucaucauaagaggguuuacuaauacucaagaguguccuuuaaugacugaucccugaucaaggcuuuggcccuucaaacugcugcuguucaaaacgugaaaugauucugcugaauccauucuugaugucucucuuuaguggucuucucauuaguggucuucucuucaaauggguuguuuucucacuaggaaaaaaaauguuccaucucuggaauuaacguugaugguguuuugcucauucugaaaguuuuuauccucccuucucaagcaugcucuguuuggcaugauugacacagugcauauacuggguggccagagcggagcauuugagggucugguggguguucucacgguaacacugaagaauuuuggccugcagaucagcacagacuggaugagacucauaucgcuugaacuuugcuuccaccucuucagcagcuuucugauauuguucaguggugacucuguagaacucugagcuccucuccuccagucuagccagcuguucuuuguagaaugcauccugcuucuuuagcacucggucuuucucuuccagcugccuagcuuugucuucaauauccaggugcuuugccuuagcgcguuccuccucgcuacauauccucucccgaaggauggcucugguuaacugcucauuggcagcagcccucucucgguccagcucuuuggcuugcuuuagucuuaguaauggguggaauaugacgguaauguuucuggcuccagguuugcagacaaauuuuguuccuccaccuucaauuaaguugucaucaggacccccucuccaauaguacccuguagaccaauauccucuaucuccauguuggcaacaagucuucauugagaugguuucacggcucccauugcucacuucugauuguuucuuuuucaacugagugagaucacauuuagcaauagcuaggugguuaucucuacccccuugagaaauccgcuuuauagaucugggauuauugggauccucuccuuugcucauuuugguuuugcuugcuguuacuaaauuggccauguaagaaaacguuuuaaauaaaucaaaugcaaccgacagaugcccucuauaaa

SEQ ID NO: 2157 - skipped

SEQ ID NO: 2158 - RNA, 2093 nt, Homo sapiens
cuuucuuggucuaccaccucuauucuggcuucacuauuugcccaugcaaccgggaccccagauuugucacugaagaaacugauucauuacgcauggacuuccuuucauguucucuguuugcagcuggucauggguuggucuuucagagaagugacuaagguaaagaaugggagagacuagaaaugagccuucuucuuagaaaguuuuaguguuucccaauugccuagugaacuaggaaaaucccccucacucuucaguucaaaguucuccauuccauggucccauuuucccuguccagugaguucccaacugugcuccaaugaggacuaaagguuccgaggaguaacaucuggguuucuaggaaggccgaaguggaggcuaagcagucaacacuccagguuucacccagagcagcuccacuuuuaucaggugcuuugccuuagcgcguuccuccucgcuacauauccucucccgaaggauggcucugguuaacugcucauuggcagcagcccucucucgguccagcucuuuggcuugcuuuagucuuaguaauggguggaauaugacgguaauguuucuggcuccagguuugcagacaaauuuuguuccuccaccuucaauuaaguugucaucaggacccccuugcaguucuccacuccgacuauagagcucccuucucuguucucgcagauaggcgcucauacugauggcaugggaggacgauucgaacuugaaaagagaauuuuuuggccuuugagguuucuucuuggcaaaaaaggcugcaaacucucguccagugcuggcauagcuuaguugagcugaugguucagaggccguacgaguauuuuucauauccaaguacucaguuaauagcaucuguagaacaucuuggaucuucacccauacaucugccauaucauacaguuugauaucuuccugcugagucaguggagucacuacaguguccugcagguaucccaggaccacagagugugcagcggcuacagcauuaaacuugucaaacaguaacuccagcaguucuagaagcaaccuugguugguucuccacaguaacguucuccccccgcugauagccacugucugccaccuggguuguagaccucuucacaauuugcuucaacuccugcuccaagcgcucuaugauugccuuaacuguuucugggaucuucuucaguuucgccaagcccuuaaugaggauacccauaaacagggugcuguuuuccucuggauccaauucuaaaucuuccuugauguccugcagauuuaucucccucacacuugagcuuccagcaguagaauagugagagguaucaaggaauuuucgaggaguagggagguuuguaacaucaaucagaggaacagaagcaucuuucacgagggagcugauuuucccuuuuuccuuguuacgcugcacaacucggcuagucgauuugauguacaggugccgguguaguucaucuaugagaaccaagugaagguucaucuucuugcugugaagcucuagucgaaggucacucaguccuuccaccuggagcagggggcccuccaaagacucaacugcugacaccaacaugucaguggcacugagauagugcuugcuggccaugcacuguuccagcuuuugaggcacuugcuugauauucucaauuucauccaacaaguucaggacaugcuuaugcucaauuccuucaauccacaguuuccgaagcucaucccguuugcagugcagcagcaucuugcaugaaagcagguucucuuuuaccugcuuuauuuuauuucgggaguuagugaugcgcucugugaugcucugguaugugcgaauggcugucgucaauucuguguagugcuguacaaucaauucauccaggucacggucacauuucucguaggcuucuucaaggcgacccuuuucauuuucccugucuucgacaucgucacuaguagacagaguccugaucacagagaugagcagccccgaggggucuuugcuuuugcugacugugcuucuguauuucccaccagcugcuucugccgccaucuuggacgcggggagagccgcuaggcuccaaggaa

SEQ ID NO: 2159 - RNA, 2765 nt, Homo sapiens
ugccagucuuugucagaaaauauauuuauuauugauagugagugaaguaaagaugugaguauucacuauagagguuuuaucagccaagguugccuucauauugauaaaaauaccuuaucucacuuguaaucauaaacauuauuccaguagaagagguacauuuucucuccuuuuugucuucuugccuguauaaucaccauaauaaguuauaaugaaauagcucuuacauaaucaaaggagaaaagaaagacaaaaccaacaugccacagccuagacaauuccauccagcacugcugccuccagaucuguuuucuggcucucuccacccagcacugcugcccucggaucuauguuuucuggcucucuccucgccccacuccaauuaauuuagcccccaaccccauccuacuuuguuaggguggagguucaccaaaugauggggcuuguucagaagagaaacauuuuauggucagugcaaguugaauagaaaguaccaaaagguggagagggcugcccuucucuuuuaaucaucauaagaggguuuacuaauacucaagaguguccuuuaaugacugaucccugaucaaggcuuuggcccuucaaacugcugcuguucaaaacgugaaaugauucugcugaauccauucuugaugucucucuuuaguggucuucucauuaguggucuucucuucaaauggguuguuuucucacuaggaaaaaaaauguuccaucucuggaauuaacguugaugguguuuugcucauucugaaaguuuuuauccucccuucucaagcaugcucuguuuggcaugauugacacagugcauauacuggguggccagagcggagcauuugagggucugguggguguucucacgguaacacugaagaauuuuggccugcagaucagcacagacuggaugagacucauaucgcuugaacuuugcuuccaccucuucagcagcuuucugauauuguucaguggugacucuguagaacucugagcuccucuccuccagucuagccagcuguucuuuguagaaugcauccugcuucuuuagcacucggucuuucucuuccagcugccuagccaggugcuuugccuuagcgcguuccuccucgcuacauauccucucccgaaggauggcucugguuaacugcucauuggcagcagcccucucucgguccagcucuuuggcuugcuuuagucuuaguaauggguggaauaugacgguaauguuucuggcuccagguuugcagacaaauuuuguuccuccaccuucaauuaaguugucaucaggacccccuugcaguucuccacuccgacuauagagcucccuucucuguucucgcagauaggcgcucauacugauggcaugggaggacgauucgaacuugaaaagagaauuuuuuggccuuugagguuucuucuuggcaaaaaaggcugcaaacucucguccagugcuggcauagcuuaguugagcugaugguucagaggccguacgaguauuuuucauauccaaguacucaguuaauagcaucuguagaacaucuuggaucuucacccauacaucugccauaucauacaguuugauaucuuccugcugagucaguggagucacuacaguguccugcagguaucccaggaccacagagugugcagcggcuacagcauuaaacuugucaaacaguaacuccagcaguucuagaagcaaccuugguugguucuccacaguaacguucuccccccgcugauagccacugucugccaccuggguuguagaccucuucacaauuugcuucaacuccugcuccaagcgcucuaugauugccuuaacuguuucugggaucuucuucaguuucgccaagcccuuaaugaggauacccauaaacagggugcuguuuuccucuggauccaauucuaaaucuuccuugauguccugcagauuuaucucccucacacuugagcuuccagcaguagaauagugagagguaucaaggaauuuucgaggaguagggagguuuguaacaucaaucagaggaacagaagcaucuuucacgagggagcugauuuucccuuuuuccuuguuacgcugcacaacucggcuagucgauuugauguacaggugccgguguaguucaucuaugagaaccaagugaagguucaucuucuugcugugaagcucuagucgaaggucacucaguccuuccaccuggagcagggggcccuccaaagacucaacugcugacaccaacaugucaguggcacugagauagugcuugcuggccaugcacuguuccagcuuuugaggcacuugcuugauauucucaauuucauccaacaaguucaggacaugcuuaugcucaauuccuucaauccacaguuuccgaagcucaucccguuugcagugcagcagcaucuugcaugaaagcagguucucuuuuaccugcuuuauuuuauuucgggaguuagugaugcgcucugugaugcucugguaugugcgaauggcugucgucaauucuguguagugcuguacaaucaauucauccaggucacggucacauuucucguaggcuucuucaaggcgacccuuuucauuuucccugucuucgacaucgucacuaguagacagaguccuuuacaccugguuuucucuaccaaacccaaauagcgugcuuuggggucccgagacuguaauagaaggugcugccccuaaagaaaagacugaggcggggcuccucucucuauagcuaaccccagaaaaa

SEQ ID NO: 2160 - skipped

SEQ ID NO: 2161 - RNA, 8165 nt, Homo sapiens
uucacaugauuauucuuguuuauugaggucucuuuauucuccacgggugcuuuuuucuucaaguaaacagagcaggcgcaaauaucuauaaugaauaaauuuauugucuuacaaaaaucauugucuagaaauaugggaauacaagaaaagauauuugcggucaggugucugguggucaacagccaguacaguucauaaagggggaaaauccaagauuccaaacccacaggacaaauucuuccuaauagauguuaaagcuuuuaacccaaaagguuuguguuuucaagcacauugcagaggaucaaggauuuagaauuaacacugauucauugucacugaaugucuguaauaccacuuugacuagagagguacaugauaugaagcacagucaaaacugaauacauuaaauuguuauagaggcgaaugauauauucaacauugucuuaguacuguagugucuaaggcacuuuccguaaugucaguuugcuuaacuaccaaccaaaaacaggaugcuaaguguucacuguaacacuguccaaagggaagggagaaggaaaaaugaaggagucacacccacuggcaugucaacauucaggaagauggcaucuguucuggaggcuccauaaaccucauugacaaacuuggaacaagccucggacacaaaaccaauauucccauuuugggcucaaagcagcggcugaauuugcaaggucagcaugagggcccggcuggcgauggggaggggccuuccaccagcucggcuuagggguccacggcugcuugcuccugacgugaggagggcgccggcagagccaggcgguucgggagaccaucuggaagucuacaugauccauggcugccaccuggggccucagcugcaguguggccacuaucccuucuaugcacagaccagcccucgccaaggccaguucacaugaguagaugcgggacaccaucgacucgaggggcagggccccccuugggggauggacaugguaaccccaaauggguguugcuuccgauccagcccaccccuccuacucuuuccaaagccccuuucacaguuugcucacugaaauagcauugaucauuauuugaaggaaaugagagagacaagugcaguuuagaguccacaguggucuaggagacuugauguggcugaggagucgggggccacgugaacacagaacuagguuaccugucuguaugacagagagcaugcagagcgacugagugacgaccacggcgcugccccaauaacccagcgacccgcaaccaagggccuggaguuuguuuuaaaaagggucuuaccauguuuuauaaaauggucucuugaugacuauauggaaaauagaugcaaugaugaaacaaucuguuuaauauauguguccugugugugucuauauauaaaaaggggagcaauuguaccuaagucugaagcaggauacaguaugcauaggcuggagagccuuaagacacaguugaucuuucaggaaggaaucccguagcuugccaauuuccgaaaucugcaggaggccccgggugcauuccuaacugucccacuguauugccuccucuggcuuccugcaacuuuacucugacugggguggcugcgucucguugacaucacuggucuuacuuucugugucaucgucggagagcuccagggaagcuccuucaaggugcagcuggcgccggccagaucggcuggaagagaagcugauggggccaccccgccucagccgguucuucagggugcugaccucgcggcucaggcccucguuggccucgguggcaucauccaguucccgcuggaguuuacgccgagaugcguuggcacgcgucgcuucuucuucugcuuccuccagcuggcguuuaagcugcuucauccgagcguuggccuucuccaucugcucuuuauacugguccgcgugucgacgcucauccucaaccugcaugaagauuucuuucagcuucuucucagugcgacggacuaauuuguuggcggcugcucguuccuuggcuuccugcucaagcugcuccuccagcugcccaaucuuggccuccagggcugagaugguggccuugaacuuagacuugacagcacccucgaguuccugcagcuuggccuucagcuccuuguucugccgcuccaguugcuggcgugcauugucacucuucugggcggcgcugcgcucggcugcuagcucggcguucaguguguccaccuguagaguggucuugcggaagcggucguugagcagcuccauguugcucugcuccucuuccagcuccuccuccagcugugcgauccgagcuuccagacgccgcuucucauccagcagcgcggacuugccagaggcgcuguuggugaucucguccgccagcucaucucucuccugcucggcgugucggcgggcucgcucagaugaggcaaguuccuccugcaauugaaggauuucugcuuccagacucuucaauuucuuuucacucucuuuggauugagcaaaaaucucaucucuggaugcacgagcuucuucuaauucacguugguaauccuucaucugagccuggagcuugcggagcugcuuaaucaccucaucccgagcuuuguucgcagccucgauuugggcuucgagguccuucaggucuaucuccaucuuuuucuuugaagcuacagcaagcgcccgcuguuuccucucauccuccagcuccgccucgagcucccgcaccuguuugaucagcagccgcuucuucucuucauucugcucaucccugguuugcaggucucucucgaacugcgccuucauggccugcauguugaccuccagacgaagcuuggcaucuuccguggccuggaguucgucuuccagcuccuccagcuggguccucauuuccuccaccugcugcucuagggcccguuuggauuuuucaaguucgugaacguuuuuucccacaucaucuuuggagcucaugaggucuuccaugucugcucggagcugcuuguucugccucucaaacuccuccuuggccuccagggcuuccucgagggcccgggccagugacagggcuuugguuucuuucucucuggccucggcuucggcccggucccgcucuucggcauagcgagcagagaugcucuucucuucugcuaacagcuggucaaacuucuucugcuucuucuccaaguuggaggcgaccuggcgcuggugguccagguccaccgugaggucguccagcuccugcugcaggcgguucuuggucuucuccaguuugucauacgccagugccuucuccuccaggcgcuggcucagggccuccgcguccuucagaagcuucuucuuggcuucuuccagacuuucaauuguucccaggucgucaucuacuuucuucuugguaucagccaacugggacugcagggccagcacuugcuucuccagguucuuccuggccuccuccuccuccuccugcugcuccugaagacuguucuucuccucuuccagcugccggauccgacugcucagguuuaguuucuggcgugucuccuccugaagaagcuccuguguauccuguaguugagacucaagacuagcugcauccuuagcaaauuuaauacccuucuucucugcuucuuccagaaggguggagacauuaucuagcucauucugcagcuuacuugcuuucuccgccagcuccacccugagccugucgccuucagagaccuuggcauggagcuccuggaccugcgcgucgagcuucuuccucuugugcucagacucagccuugaccugcugcaggaccuucaccucacacgccagcuccuuguuaucugucuccaggcccugcuuguucuucucuagauuugcuuugaaccgcuuggccuguuccagcugcucugagagcuccuccagggcuguugcgugucuuugucucauguccuggauuugagcuucaugguucuuaguuuccuccucaagagcuuucuucagcucugccacuucuuguucacguuuuguacguaguuccugcugggcugccgugguguccagcguguccuccagcucuguuuucagagcuuccaguuccucacucaagucccuuuucugcuuuucggccuuguuccgugaagccuucucggauucaaagucuuccugaaguucagcaauuugggcuuguagcucucgcacaacuuuaagggcauuguucuuauggaguguuucaucaucaccucuggccagugcgcccugcagcuccuccuccuucuuggccagcugcagcuugagcucaucaaucugcgccugcagcucugcgaucugguccugcaggucggucgucuccccgucgaguuuucuuuuggccuuuuccaguuccugacgagucuuuucuuccuucuuuaagcguucuucuaaaucugagaucaucacuucuugcuuauuccugauuuuggccaaguuuuucgccuuuucuuccucuucagccagcugagaggaacacucagcaaugcgaucuuccaugaguuucuuuucuuugaugaacuuggaauuuugguccucgagaagcagaaucuccucuuccaucuucuugaucuuggccucugcugucaccuuuuccagcugcagcuuuugccgagccccuuccuccucgucuagcuguucuuccagguccugaauaugugcuugcauuuuuuucuuuucauuuuggaggauuugguuucuuucuucuucuucuucaacccuagacuccaagucauguagaaucucuucuaauuccugcuuuuuagcagcaagucuugcccucaucucuucugcuucagcaaagagcucagucucugcuuguaguuguucugcaaggauauucuucucuucuaaaagcugcuggugcuuccgcuccaucuccuccagcucuccuuccaccuucgucugcuucuccuucaccuucaacagcucuucaucuuuggccugaaguucuuccuccuggcgagucacuuguagaagcggcuucaccuuugugaagacucgccaccacugccagugccguaauuucagguacgcggcacaguuccgcugcaagaccuuuaaggcacuuaguugcugcugcuucuuggcaaaggccuuucuggccagguaaccucugcaaacggccuggaagaagauaaugauaucggugauuuuuaaaucucuuucuuccucuaagugugccagaacuccagcucugaaaaauaucuugcucuguccaauucuguacaaguuuggguccaauucuaaagcccggaucauucguucacaggccuguuuaccauccauaaaaccuuuaggaauagcauuuggaguuaggaucucauaucucugucugaauuccuggaaaacuauucgguuagggaagcccuggcgacagauucggaucccuuccaggacaccguuacagcgaagcugaucuaggacuagguguggauccaauuuuccagcccucuucucgugauuuggaaugauacaacgaacaaaguuaggguugguguuucggagaguugccaucagcuuggugagagauucuuuguagaguugcccaacgguacgaaacaugcccuucuugguuuuauaugcggagccaaaagcugucucagucauaccagugacuugauccagacccacgauacgguccacugguggcucaugaagaccagaaacacugucauagaaagaagcucucugaauauucugaaucucaucuuuccaaagcucugccacaaaucugucugaugacuggugcaaaaggguggccacguugucauucaggggguccauauucuucaucagccacucaucugccuuauaguccaccuucccugcauaauguauaaugcaaaaaucagcuuugucuuuuaauugucgagguuucugaaacuuggagugggaaccuugcucuugaaccaguuuuucaacaaagguuuuaucuguggcuuuagggaaccagcauucuucauccaaaagggccaguacaccaggaggguucgcaggucucucuauuaggucgaugcauggcugcagauccagcccgaaaucgaugaaguuccacucgaugccuucgcgcugguauuccucuuguucuaggauaaacauggugugguugaacagcugcugcagcuucucauugguguaguugaugcaaaguuguucaaaggaguucagcucaaaaauuucaaauccagcaauauccaggauuccaaugaaagaugcucccugacguuugguccuauccagagcuuuauugaugcgaugaacgagccagcgaaagagccgcucauagguagcuuuugccaaugcuucuacugcaaaaucugccuguucuuuggucugggcuuuuugcacauagucucggccgaccuugauccggggagucaggauggcccgaguaaacuccaucacauucaucccaagaagauggcagagcuucugcgcaacuguauuuucuggcauggaagcuugaucaguauuucucuccuuuuugaaagaaauauuuccaaacuguagcacugaagauacuacuuuaagcauugacagaaucucuucaugggagaagcccauuaugugcauugcuuccauggucuccuggaaauuaucuuugucuugcugucccggaauaggaauauagccauuggagagaaaccuguaguuauuaaauccuucaagaagcaaaucagacuuuagguguucuccugcuccagauaacaacugguaaaagauaugaaaaguacguucaucuuuugcuugacgaacagcacgagacuuuuccagaagguauguuucaauguuggccccaacgauauagccaguuacaucaaaguugauccgaauaaauuugccaaaacgagaugaguuaucauuuuucacagucuucgcauuuccaaaugauuccagaauuggauuugcuugcaaaagcugccguucaaguucccccugguguuucacugguuuaggcgauuccugaggaauauuaugguccuuucuuccuuuaugugaagaagcaacaugggcaagguacugaauaacuuucuuuguauuuucugucuucccagcaccugacucacccgugcaaagaauugacugguccucacgaucuugaagcaugcaucuguaagcagauucagauauagcauagauguguggaggcaucucaugacgcuucuucccucuguacauuucaauaauauucucagaguaaauuggaagauucuuguaaggguuuauaacuacacagaagaguccagaauaagucuccugaaacagugaggacaucucacagaccagacaggagcuggggcucugcaucucacagcggugccugucagacaggaagaagucccgcagaaguggcgugugggucagggccugcacgaugcaguucaugaagcauguguucccaagguugaucagcccacgcagaccuauggugcaguucgaggugaucuuucuccuuuucggguugugcuucagcaguucaagcucccguuugguugguucccaaguugaaaacuucucuccaacgccuugcauuuuccaagcuuuucgcugcuccuccuuggcgauuauuuccaugucuuugucauagauguaguccuggcacagaaaacaguagaugccuccguacaucagaucaauggccagguugugccgcuucgccuucgcaugcucgugaauaugcuucuuugugaaacagccgaagaagacacaguagaggcaggaaugcagccuguugagguggacgccacagacauggcagauacaggacuuggccuugcgcuugcgggccucagccgugccgcuccacacgaagcacugguagauggcccgcagguucugcuuccaguuguccaccuugaagcugcccaggugcgagcagcccggcggcgcuaccgccagcucggcguccauggccucgcccucgggcucuggccgggacaccauggggggcaaggcccggccgcgcgcggggggcggcggcgagggaggcgaggacgacgccagcgcggcgugggggcugcucggcggcuggccaggcuggccaaggcccgggcgccgagaacaaagcgcggaggccggacaaagauggggcugcgcgaucgccgaggggaggcugcaaggcaggcaccgcccccgagcugcggcugc

SEQ ID NO: 2162 - RNA, 7859 nt, Homo sapiens
uucacaugauuauucuuguuuauugaggucucuuuauucuccacgggugcuuuuuucuucaaguaaacagagcaggcgcaaauaucuauaaugaauaaauuuauugucuuacaaaaaucauugucuagaaauaugggaauacaagaaaagauauuugcggucaggugucugguggucaacagccaguacaguucauaaagggggaaaauccaagauuccaaacccacaggacaaauucuuccuaauagauguuaaagcuuuuaacccaaaagguuuguguuuucaagcacauugcagaggaucaaggauuuagaauuaacacugauucauugucacugaaugucuguaauaccacuuugacuagagagguacaugauaugaagcacagucaaaacugaauacauuaaauuguuauagaggcgaaugauauauucaacauugucuuaguacuguagugucuaaggcacuuuccguaaugucaguuugcuuaacuaccaaccaaaaacaggaugcuaaguguucacuguaacacuguccaaagggaagggagaaggaaaaaugaaggagucacacccacuggcaugucaacauucaggaagauggcaucuguucuggaggcuccauaaaccucauugacaaacuuggaacaagccucggacacaaaaccaauauucccauuuugggcucaaagcagcggcugaauuugcaaggucagcaugagggcccggcuggcgauggggaggggccuuccaccagcucggcuuagggguccacggcugcuugcuccugacgugaggagggcgccggcagagccaggcgguucgggagaccaucuggaagucuacaugauccauggcugccaccuggggccucagcugcaguguggccacuaucccuucuaugcacagaccagcccucgccaaggccaguucacaugaguagaugcgggacaccaucgacucgaggggcagggccccccuugggggauggacaugguaaccccaaauggguguugcuuccgauccagcccaccccuccuacucuuuccaaagccccuuucacaguuugcucacugaaauagcauugaucauuauuugaaggaaaugagagagacaagugcaguuuagaguccacaguggucuaggagacuugauguggcugaggagucgggggccacgugaacacagaacuagguuaccugucuguaugacagagagcaugcagagcgacugagugacgaccacggcgcugccccaauaacccagcgacccgcaaccaagggccuggaguuuguuuuaaaaagggucuuaccauguuuuauaaaauggucucuugaugacuauauggaaaauagaugcaaugaugaaacaaucuguuuaauauauguguccugugugugucuauauauaaaaaggggagcaauuguaccuaagucugaagcaggauacaguaugcauaggcuggagagccuuaagacacaguugaucuuucaggaaggaaucccguagcuugccaauuuccgaaaucugcaggaggccccgggugcauuccuaacugucccacuguauugccuccucuggcuuccugcaacuuuacucugacugggguggcugcgucucguugacaucacuggucuuacuuucugugucaucgucggagagcuccagggaagcuccuucaaggugcagcuggcgccggccagaucggcuggaagagaagcugauggggccaccccgccucagccgguucuucagggugcugaccucgcggcucaggcccucguuggccucgguggcaucauccaguucccgcuggaguuuacgccgagaugcguuggcacgcgucgcuucuucuucugcuuccuccagcuggcguuuaagcugcuucauccgagcguuggccuucuccaucugcucuuuauacugguccgcgugucgacgcucauccucaaccugcaugaagauuucuuucagcuucuucucagugcgacggacuaauuuguuggcggcugcucguuccuuggcuuccugcucaagcugcuccuccagcugcccaaucuuggccuccagggcugagaugguggccuugaacuuagacuugacagcacccucgaguuccugcagcuuggccuucagcuccuuguucugccgcuccaguugcuggcgugcauugucacucuucugggcggcgcugcgcucggcugcuagcucggcguucaguguguccaccuguagaguggucuugcggaagcggucguugagcagcuccauguugcucugcuccucuuccagcuccuccuccagcugugcgauccgagcuuccagacgccgcuucucauccagcagcgcggacuugccagaggcgcuguuggugaucucguccgccagcucaucucucuccugcucggcgugucggcgggcucgcucagaugaggcaaguuccuccugcaauugaaggauuucugcuuccagacucuucaauuucuuuucacucucuuuggauugagcaaaaaucucaucucuggaugcacgagcuucuucuaauucacguugguaauccuucaucugagccuggagcuugcggagcugcuuaaucaccucaucccgagcuuuguucgcagccucgauuugggcuucgagguccuucaggucuaucuccaucuuuuucuuugaagcuacagcaagcgcccgcuguuuccucucauccuccagcuccgccucgagcucccgcaccuguuugaucagcagccgcuucuucucuucauucugcucaucccugguuugcaggucucucucgaacugcgccuucauggccugcauguugaccuccagacgaagcuuggcaucuuccguggccuggaguucgucuuccagcuccuccagcuggguccucauuuccuccaccugcugcucuagggcccguuuggauuuuucaaguucgugaacguuuuuucccacaucaucuuuggagcucaugaggucuuccaugucugcucggagcugcuuguucugccucucaaacuccuccuuggccuccagggcuuccucgagggcccgggccagugacagggcuuugguuucuuucucucuggccucggcuucggcccggucccgcucuucggcauagcgagcagagaugcucuucucuucugcuaacagcuggucaaacuucuucugcuucuucuccaaguuggaggcgaccuggcgcuggugguccagguccaccgugaggucguccagcuccugcugcaggcgguucuuggucuucuccaguuugucauacgccagugccuucuccuccaggcgcuggcucagggccuccgcguccuucagaagcuucuucuuggcuucuuccagacuuucaauuguucccaggucgucaucuacuuucuucuugguaucagccaacugggacugcagggccagcacuugcuucuccagguucuuccuggccuccuccuccuccuccugcugcuccugaagacuguucuucuccucuuccagcugccggauccgacugcucagguuuaguuucuggcgugucuccuccugaagaagcuccuguguauccuguaguugagacucaagacuagcugcauccuuagcaaauuuaauacccuucuucucugcuucuuccagaaggguggagacauuaucuagcucauucugcagcuuacuugcuuucuccgccagcuccacccugagccugucgccuucagagaccuuggcauggagcuccuggaccugcgcgucgagcuucuuccucuugugcucagacucagccuugaccugcugcaggaccuucaccucacacgccagcuccuuguuaucugucuccaggcccugcuuguucuucucuagauuugcuuugaaccgcuuggccuguuccagcugcucugagagcuccuccagggcuguugcgugucuuugucucauguccuggauuugagcuucaugguucuuaguuuccuccucaagagcuuucuucagcucugccacuucuuguucacguuuuguacguaguuccugcugggcugccgugguguccagcguguccuccagcucuguuuucagagcuuccaguuccucacucaagucccuuuucugcuuuucggccuuguuccgugaagccuucucggauucaaagucuuccugaaguucagcaauuugggcuuguagcucucgcacaacuuuaagggcauuguucuuauggaguguuucaucaucaccucuggccagugcgcccugcagcuccuccuccuucuuggccagcugcagcuugagcucaucaaucugcgccugcagcucugcgaucugguccugcaggucggucgucuccccgucgaguuuucuuuuggccuuuuccaguuccugacgagucuuuucuuccuucuuuaagcguucuucuaaaucugagaucaucacuucuugcuuauuccugauuuuggccaaguuuuucgccuuuucuuccucuucagccagcugagaggaacacucagcaaugcgaucuuccaugaguuucuuuucuuugaugaacuuggaauuuugguccucgagaagcagaaucuccucuuccaucuucuugaucuuggccucugcugucaccuuuuccagcugcagcuuuugccgagccccuuccuccucgucuagcuguucuuccagguccugaauaugugcuugcauuuuuuucuuuucauuuuggaggauuugguuucuuucuucuucuucuucaacccuagacuccaagucauguagaaucucuucuaauuccugcuuuuuagcagcaagucuugcccucaucucuucugcuucagcaaagagcucagucucugcuuguaguuguucugcaaggauauucuucucuucuaaaagcugcuggugcuuccgcuccaucuccuccagcucuccuuccaccuucgucugcuucuccuucaccuucaacagcucuucaucuuuggccugaaguucuuccuccuggcgagucacuuguagaagcggcuucaccuuugugaagacucgccaccacugccagugccguaauuucagguacgcggcacaguuccgcugcaagaccuuuaaggcacuuaguugcugcugcuucuuggcaaaggccuuucuggccagguaaccucugcaaacggccuggaagaagauaaugauaucggugauuuuuaaaucucuuucuuccucuaagugugccagaacuccagcucugaaaaauaucuugcucuguccaauucuguacaaguuuggguccaauucuaaagcccggaucauucguucacaggccuguuuaccauccauaaaaccuuuaggaauagcauuuggaguuaggaucucauaucucugucugaauuccuggaaaacuauucgguuagggaagcccuggcgacagauucggaucccuuccaggacaccguuacagcgaagcugaucuaggacuagguguggauccaauuuuccagcccucuucucgugauuuggaaugauacaacgaacaaaguuaggguugguguuucggagaguugccaucagcuuggugagagauucuuuguagaguugcccaacgguacgaaacaugcccuucuugguuuuauaugcggagccaaaagcugucucagucauaccagugacuugauccagacccacgauacgguccacaucuuuccaaagcucugccacaaaucugucugaugacuggugcaaaaggguggccacguugucauucaggggguccauauucuucaucagccacucaucugccuuauaguccaccuucccugcauaauguauaaugcaaaaaucagcuuugucuuuuaauugucgagguuucugaaacuuggagugggaaccuugcucuugaaccaguuuuucaacaaagguuuuaucuguggcuuuagggaaccagcauucuucauccaaaagggccaguacaccaggaggguucgcaggucucucuauuaggucgaugcauggcugcagauccagcccgaaaucgaugaaguuccacucgaugccuucgcgcugguauuccucuuguucuaggauaaacauggugugguugaacagcugcugcagcuucucauugguguaguugaugcaaaguuguucaaaggaguucagcucaaaaauuucaaauccagcaauauccaggauuccaaugaaagaugcucccugacguuugguccuauccagagcuuuauugaugcgaugaacgagccagcgaaagagccgcucauagguagcuuuugccaaugcuucuacugcaaaaucugccuguucuuuggucugggcuuuuugcacauagucucggccgaccuugauccggggagucaggauggcccgaguaaacuccaucacauucaucccaagaagauggcagagcuucugcgcaacuguauuuucuggcauggaagcuugaucaguauuucucuccuuuuugaaagaaauauuuccaaacuguagcacugaagauacuacuuuaagcauugacagaaucucuucaugggagaagcccauuaugugcauugcuuccauggucuccuggaaauuaucuuugucuugcugucccggaauaggaauauagccauuggagagaaaccuguaguuauuaaauccuucaagaagcaaaucagacuuuagguguucuccugcuccagauaacaacugguaaaagauaugaaaaguacguucaucuuuugcuugacgaacagcacgagacuuuuccagaagguauguuucaauguuggccccaacgauauagccaguuacaucaaaguugauccgaauaaauuugccaaaacgagaugaguuaucauuuuucacagucuucgcauuuccaaaugauuccagaauuggauuugcuugcaaaagcugccguucaaguucccccugguguuucacugguuuaggcgauucaggaauauuaugguccuuucuuccuuuaugugaagaagcaacaugggcaagguacugaauaacuuucuuuguauuuucugucuucccagcaccugacucacccgugcaaagaauugacugguccucacgaucuugaagcaugcaucuguaagcagauucagauauagcauagauguguggaggcaucucaugacgcuucuucccucuguacauuucaauaauauucucagaguaaauuggaagauucuuguaaggguuuauaacuacacagaagaguccagaauaagucuccugaaacagugaggacaucucacagaccagacaggagcuggggcucugcaucucacagcggugccugucagacaggaagaagucccgcagaaguggcgugugggucagggccugcacgaugcaguucaugaagcauguguucccaagguugaucagcccacgcagaccuauggugcaguucgaggugaucuuucuccuuuucggguugugcuucagcaguucaagcucccguuugguugguucccaaguugaaaacuucucuccaacgccuugcauuuuccaagcuuuucgcugcuccuccuuggcgauuauuuccaugucuuugucauagauguaguccuggcacagaaaacaguagaugccuccguacaucagaucaauggccagguugugccgcuucgccuucgcaugcucgugaauaugcuucuuugugaaacagccgaagaagacacaguagaggcaggaaugcagccuguugagguggacgccacagacauggcagauacaggacuuggccuggcucgggcccugcagugccguggcccggggcuggaacugccugccaacugccugguaggcgcugcccccggccgcaagcuggggcgccuccugucgggagcccgcugauagugagggccaacccggcgccau

SEQ ID NO: 2163 - RNA, 8099 nt, Homo sapiens
uucacaugauuauucuuguuuauugaggucucuuuauucuccacgggugcuuuuuucuucaaguaaacagagcaggcgcaaauaucuauaaugaauaaauuuauugucuuacaaaaaucauugucuagaaauaugggaauacaagaaaagauauuugcggucaggugucugguggucaacagccaguacaguucauaaagggggaaaauccaagauuccaaacccacaggacaaauucuuccuaauagauguuaaagcuuuuaacccaaaagguuuguguuuucaagcacauugcagaggaucaaggauuuagaauuaacacugauucauugucacugaaugucuguaauaccacuuugacuagagagguacaugauaugaagcacagucaaaacugaauacauuaaauuguuauagaggcgaaugauauauucaacauugucuuaguacuguagugucuaaggcacuuuccguaaugucaguuugcuuaacuaccaaccaaaaacaggaugcuaaguguucacuguaacacuguccaaagggaagggagaaggaaaaaugaaggagucacacccacuggcaugucaacauucaggaagauggcaucuguucuggaggcuccauaaaccucauugacaaacuuggaacaagccucggacacaaaaccaauauucccauuuugggcucaaagcagcggcugaauuugcaaggucagcaugagggcccggcuggcgauggggaggggccuuccaccagcucggcuuagggguccacggcugcuugcuccugacgugaggagggcgccggcagagccaggcgguucgggagaccaucuggaagucuacaugauccauggcugccaccuggggccucagcugcaguguggccacuaucccuucuaugcacagaccagcccucgccaaggccaguucacaugaguagaugcgggacaccaucgacucgaggggcagggccccccuugggggauggacaugguaaccccaaauggguguugcuuccgauccagcccaccccuccuacucuuuccaaagccccuuucacaguuugcucacugaaauagcauugaucauuauuugaaggaaaugagagagacaagugcaguuuagaguccacaguggucuaggagacuugauguggcugaggagucgggggccacgugaacacagaacuagguuaccugucuguaugacagagagcaugcagagcgacugagugacgaccacggcgcugccccaauaacccagcgacccgcaaccaagggccuggaguuuguuuuaaaaagggucuuaccauguuuuauaaaauggucucuugaugacuauauggaaaauagaugcaaugaugaaacaaucuguuuaauauauguguccugugugugucuauauauaaaaaggggagcaauuguaccuaagucugaagcaggauacaguaugcauaggcuggagagccuuaagacacaguugaucuuucaggaaggaaucccguagcuugccaauuuccgaaaucugcaggaggccccgggugcauuccuaacugucccacuguauugccuccucuggcuuccugcaacuuuacucugacugggguggcugcgucucguugacaucacuggucuuacuuucugugucaucgucggagagcuccagggaagcuccuucaaggugcagcuggcgccggccagaucggcuggaagagaagcugauggggccaccccgccucagccgguucuucagggugcugaccucgcggcucaggcccucguuggccucgguggcaucauccaguucccgcuggaguuuacgccgagaugcguuggcacgcgucgcuucuucuucugcuuccuccagcuggcguuuaagcugcuucauccgagcguuggccuucuccaucugcucuuuauacugguccgcgugucgacgcucauccucaaccugcaugaagauuucuuucagcuucuucucagugcgacggacuaauuuguuggcggcugcucguuccuuggcuuccugcucaagcugcuccuccagcugcccaaucuuggccuccagggcugagaugguggccuugaacuuagacuugacagcacccucgaguuccugcagcuuggccuucagcuccuuguucugccgcuccaguugcuggcgugcauugucacucuucugggcggcgcugcgcucggcugcuagcucggcguucaguguguccaccuguagaguggucuugcggaagcggucguugagcagcuccauguugcucugcuccucuuccagcuccuccuccagcugugcgauccgagcuuccagacgccgcuucucauccagcagcgcggacuugccagaggcgcuguuggugaucucguccgccagcucaucucucuccugcucggcgugucggcgggcucgcucagaugaggcaaguuccuccugcaauugaaggauuucugcuuccagacucuucaauuucuuuucacucucuuuggauugagcaaaaaucucaucucuggaugcacgagcuucuucuaauucacguugguaauccuucaucugagccuggagcuugcggagcugcuuaaucaccucaucccgagcuuuguucgcagccucgauuugggcuucgagguccuucaggucuaucuccaucuuuuucuuugaagcuacagcaagcgcccgcuguuuccucucauccuccagcuccgccucgagcucccgcaccuguuugaucagcagccgcuucuucucuucauucugcucaucccugguuugcaggucucucucgaacugcgccuucauggccugcauguugaccuccagacgaagcuuggcaucuuccguggccuggaguucgucuuccagcuccuccagcuggguccucauuuccuccaccugcugcucuagggcccguuuggauuuuucaaguucgugaacguuuuuucccacaucaucuuuggagcucaugaggucuuccaugucugcucggagcugcuuguucugccucucaaacuccuccuuggccuccagggcuuccucgagggcccgggccagugacagggcuuugguuucuuucucucuggccucggcuucggcccggucccgcucuucggcauagcgagcagagaugcucuucucuucugcuaacagcuggucaaacuucuucugcuucuucuccaaguuggaggcgaccuggcgcuggugguccagguccaccgugaggucguccagcuccugcugcaggcgguucuuggucuucuccaguuugucauacgccagugccuucuccuccaggcgcuggcucagggccuccgcguccuucagaagcuucuucuuggcuucuuccagacuuucaauuguucccaggucgucaucuacuuucuucuugguaucagccaacugggacugcagggccagcacuugcuucuccagguucuuccuggccuccuccuccuccuccugcugcuccugaagacuguucuucuccucuuccagcugccggauccgacugcucagguuuaguuucuggcgugucuccuccugaagaagcuccuguguauccuguaguugagacucaagacuagcugcauccuuagcaaauuuaauacccuucuucucugcuucuuccagaaggguggagacauuaucuagcucauucugcagcuuacuugcuuucuccgccagcuccacccugagccugucgccuucagagaccuuggcauggagcuccuggaccugcgcgucgagcuucuuccucuugugcucagacucagccuugaccugcugcaggaccuucaccucacacgccagcuccuuguuaucugucuccaggcccugcuuguucuucucuagauuugcuuugaaccgcuuggccuguuccagcugcucugagagcuccuccagggcuguugcgugucuuugucucauguccuggauuugagcuucaugguucuuaguuuccuccucaagagcuuucuucagcucugccacuucuuguucacguuuuguacguaguuccugcugggcugccgugguguccagcguguccuccagcucuguuuucagagcuuccaguuccucacucaagucccuuuucugcuuuucggccuuguuccgugaagccuucucggauucaaagucuuccugaaguucagcaauuugggcuuguagcucucgcacaacuuuaagggcauuguucuuauggaguguuucaucaucaccucuggccagugcgcccugcagcuccuccuccuucuuggccagcugcagcuugagcucaucaaucugcgccugcagcucugcgaucugguccugcaggucggucgucuccccgucgaguuuucuuuuggccuuuuccaguuccugacgagucuuuucuuccuucuuuaagcguucuucuaaaucugagaucaucacuucuugcuuauuccugauuuuggccaaguuuuucgccuuuucuuccucuucagccagcugagaggaacacucagcaaugcgaucuuccaugaguuucuuuucuuugaugaacuuggaauuuugguccucgagaagcagaaucuccucuuccaucuucuugaucuuggccucugcugucaccuuuuccagcugcagcuuuugccgagccccuuccuccucgucuagcuguucuuccagguccugaauaugugcuugcauuuuuuucuuuucauuuuggaggauuugguuucuuucuucuucuucuucaacccuagacuccaagucauguagaaucucuucuaauuccugcuuuuuagcagcaagucuugcccucaucucuucugcuucagcaaagagcucagucucugcuuguaguuguucugcaaggauauucuucucuucuaaaagcugcuggugcuuccgcuccaucuccuccagcucuccuuccaccuucgucugcuucuccuucaccuucaacagcucuucaucuuuggccugaaguucuuccuccuggcgagucacuuguagaagcggcuucaccuuugugaagacucgccaccacugccagugccguaauuucagguacgcggcacaguuccgcugcaagaccuuuaaggcacuuaguugcugcugcuucuuggcaaaggccuuucuggccagguaaccucugcaaacggccuggaagaagauaaugauaucggugauuuuuaaaucucuuucuuccucuaagugugccagaacuccagcucugaaaaauaucuugcucuguccaauucuguacaaguuuggguccaauucuaaagcccggaucauucguucacaggccuguuuaccauccauaaaaccuuuaggaauagcauuuggaguuaggaucucauaucucugucugaauuccuggaaaacuauucgguuagggaagcccuggcgacagauucggaucccuuccaggacaccguuacagcgaagcugaucuaggacuagguguggauccaauuuuccagcccucuucucgugauuuggaaugauacaacgaacaaaguuaggguugguguuucggagaguugccaucagcuuggugagagauucuuuguagaguugcccaacgguacgaaacaugcccuucuugguuuuauaugcggagccaaaagcugucucagucauaccagugacuugauccagacccacgauacgguccacaucuuuccaaagcucugccacaaaucugucugaugacuggugcaaaaggguggccacguugucauucaggggguccauauucuucaucagccacucaucugccuuauaguccaccuucccugcauaauguauaaugcaaaaaucagcuuugucuuuuaauugucgagguuucugaaacuuggagugggaaccuugcucuugaaccaguuuuucaacaaagguuuuaucuguggcuuuagggaaccagcauucuucauccaaaagggccaguacaccaggaggguucgcaggucucucuauuaggucgaugcauggcugcagauccagcccgaaaucgaugaaguuccacucgaugccuucgcgcugguauuccucuuguucuaggauaaacauggugugguugaacagcugcugcagcuucucauugguguaguugaugcaaaguuguucaaaggaguucagcucaaaaauuucaaauccagcaauauccaggauuccaaugaaagaugcucccugacguuugguccuauccagagcuuuauugaugcgaugaacgagccagcgaaagagccgcucauagguagcuuuugccaaugcuucuacugcaaaaucugccuguucuuuggucugggcuuuuugcacauagucucggccgaccuugauccggggagucaggauggcccgaguaaacuccaucacauucaucccaagaagauggcagagcuucugcgcaacuguauuuucuggcauggaagcuugaucaguauuucucuccuuuuugaaagaaauauuuccaaacuguagcacugaagauacuacuuuaagcauugacagaaucucuucaugggagaagcccauuaugugcauugcuuccauggucuccuggaaauuaucuuugucuugcugucccggaauaggaauauagccauuggagagaaaccuguaguuauuaaauccuucaagaagcaaaucagacuuuagguguucuccugcuccagauaacaacugguaaaagauaugaaaaguacguucaucuuuugcuugacgaacagcacgagacuuuuccagaagguauguuucaauguuggccccaacgauauagccaguuacaucaaaguugauccgaauaaauuugccaaaacgagaugaguuaucauuuuucacagucuucgcauuuccaaaugauuccagaauuggauuugcuugcaaaagcugccguucaaguucccccugguguuucacugguuuaggcgauucaggaauauuaugguccuuucuuccuuuaugugaagaagcaacaugggcaagguacugaauaacuuucuuuguauuuucugucuucccagcaccugacucacccgugcaaagaauugacugguccucacgaucuugaagcaugcaucuguaagcagauucagauauagcauagauguguggaggcaucucaugacgcuucuucccucuguacauuucaauaauauucucagaguaaauuggaagauucuuguaaggguuuauaacuacacagaagaguccagaauaagucuccugaaacagugaggacaucucacagaccagacaggagcuggggcucugcaucucacagcggugccugucagacaggaagaagucccgcagaaguggcgugugggucagggccugcacgaugcaguucaugaagcauguguucccaagguugaucagcccacgcagaccuauggugcaguucgaggugaucuuucuccuuuucggguugugcuucagcaguucaagcucccguuugguugguucccaaguugaaaacuucucuccaacgccuugcauuuuccaagcuuuucgcugcuccuccuuggcgauuauuuccaugucuuugucauagauguaguccuggcacagaaaacaguagaugccuccguacaucagaucaauggccagguugugccgcuucgccuucgcaugcucgugaauaugcuucuuugugaaacagccgaagaagacacaguagaggcaggaaugcagccuguugagguggacgccacagacauggcagauacaggacuuggccuugcgcuugcgggccucagccgugccgcuccacacgaagcacugguagauggcccgcagguucugcuuccaguuguccaccuugaagcugcccaggugcgagcagcccggcggcgcuaccgccagcucggcguccauggccucgcccucgggcucuggccgggacaccauggggggcaaggcccggccgcgcgcggggggcggcggcgagggaggcgaggacgacgccagcgcggcgugggggcugcucggcggcuggccaggcuggccaaggcccgggcgccgagaacaaagcgcggaggccggacaaagauggggcugcgcgaucgccgaggggaggcugcaaggcaggcaccgcccccgagcugcggcugc

SEQ ID NO: 2164 - RNA, 7832 nt, Homo sapiens
uucacaugauuauucuuguuuauugaggucucuuuauucuccacgggugcuuuuuucuucaaguaaacagagcaggcgcaaauaucuauaaugaauaaauuuauugucuuacaaaaaucauugucuagaaauaugggaauacaagaaaagauauuugcggucaggugucugguggucaacagccaguacaguucauaaagggggaaaauccaagauuccaaacccacaggacaaauucuuccuaauagauguuaaagcuuuuaacccaaaagguuuguguuuucaagcacauugcagaggaucaaggauuuagaauuaacacugauucauugucacugaaugucuguaauaccacuuugacuagagagguacaugauaugaagcacagucaaaacugaauacauuaaauuguuauagaggcgaaugauauauucaacauugucuuaguacuguagugucuaaggcacuuuccguaaugucaguuugcuuaacuaccaaccaaaaacaggaugcuaaguguucacuguaacacuguccaaagggaagggagaaggaaaaaugaaggagucacacccacuggcaugucaacauucaggaagauggcaucuguucuggaggcuccauaaaccucauugacaaacuuggaacaagccucggacacaaaaccaauauucccauuuugggcucaaagcagcggcugaauuugcaaggucagcaugagggcccggcuggcgauggggaggggccuuccaccagcucggcuuagggguccacggcugcuugcuccugacgugaggagggcgccggcagagccaggcgguucgggagaccaucuggaagucuacaugauccauggcugccaccuggggccucagcugcaguguggccacuaucccuucuaugcacagaccagcccucgccaaggccaguucacaugaguagaugcgggacaccaucgacucgaggggcagggccccccuugggggauggacaugguaaccccaaauggguguugcuuccgauccagcccaccccuccuacucuuuccaaagccccuuucacaguuugcucacugaaauagcauugaucauuauuugaaggaaaugagagagacaagugcaguuuagaguccacaguggucuaggagacuugauguggcugaggagucgggggccacgugaacacagaacuagguuaccugucuguaugacagagagcaugcagagcgacugagugacgaccacggcgcugccccaauaacccagcgacccgcaaccaagggccuggaguuuguuuuaaaaagggucuuaccauguuuuauaaaauggucucuugaugacuauauggaaaauagaugcaaugaugaaacaaucuguuuaauauauguguccugugugugucuauauauaaaaaggggagcaauuguaccuaagucugaagcaggauacaguaugcauaggcuggagagccuuaagacacaguugaucuuucaggaaggaaucccguagcuugccaauuuccgaaaucugcaggaggccccgggugcauuccuaacugucccacuguauugccuccucuggcuuccugcaacuuuacucugacugggguggcugcgucucguugacaucacuggucuuacuuucugugucaucgucggagagcuccagggaagcuccuucaaggugcagcuggcgccggccagaucggcuggaagagaagcugauggggccaccccgccucagccgguucuucagggugcugaccucgcggcucaggcccucguuggccucgguggcaucauccaguucccgcuggaguuuacgccgagaugcguuggcacgcgucgcuucuucuucugcuuccuccagcuggcguuuaagcugcuucauccgagcguuggccuucuccaucugcucuuuauacugguccgcgugucgacgcucauccucaaccugcaugaagauuucuuucagcuucuucucagugcgacggacuaauuuguuggcggcugcucguuccuuggcuuccugcucaagcugcuccuccagcugcccaaucuuggccuccagggcugagaugguggccuugaacuuagacuugacagcacccucgaguuccugcagcuuggccuucagcuccuuguucugccgcuccaguugcuggcgugcauugucacucuucugggcggcgcugcgcucggcugcuagcucggcguucaguguguccaccuguagaguggucuugcggaagcggucguugagcagcuccauguugcucugcuccucuuccagcuccuccuccagcugugcgauccgagcuuccagacgccgcuucucauccagcagcgcggacuugccagaggcgcuguuggugaucucguccgccagcucaucucucuccugcucggcgugucggcgggcucgcucagaugaggcaaguuccuccugcaauugaaggauuucugcuuccagacucuucaauuucuuuucacucucuuuggauugagcaaaaaucucaucucuggaugcacgagcuucuucuaauucacguugguaauccuucaucugagccuggagcuugcggagcugcuuaaucaccucaucccgagcuuuguucgcagccucgauuugggcuucgagguccuucaggucuaucuccaucuuuuucuuugaagcuacagcaagcgcccgcuguuuccucucauccuccagcuccgccucgagcucccgcaccuguuugaucagcagccgcuucuucucuucauucugcucaucccugguuugcaggucucucucgaacugcgccuucauggccugcauguugaccuccagacgaagcuuggcaucuuccguggccuggaguucgucuuccagcuccuccagcuggguccucauuuccuccaccugcugcucuagggcccguuuggauuuuucaaguucgugaacguuuuuucccacaucaucuuuggagcucaugaggucuuccaugucugcucggagcugcuuguucugccucucaaacuccuccuuggccuccagggcuuccucgagggcccgggccagugacagggcuuugguuucuuucucucuggccucggcuucggcccggucccgcucuucggcauagcgagcagagaugcucuucucuucugcuaacagcuggucaaacuucuucugcuucuucuccaaguuggaggcgaccuggcgcuggugguccagguccaccgugaggucguccagcuccugcugcaggcgguucuuggucuucuccaguuugucauacgccagugccuucuccuccaggcgcuggcucagggccuccgcguccuucagaagcuucuucuuggcuucuuccagacuuucaauuguucccaggucgucaucuacuuucuucuugguaucagccaacugggacugcagggccagcacuugcuucuccagguucuuccuggccuccuccuccuccuccugcugcuccugaagacuguucuucuccucuuccagcugccggauccgacugcucagguuuaguuucuggcgugucuccuccugaagaagcuccuguguauccuguaguugagacucaagacuagcugcauccuuagcaaauuuaauacccuucuucucugcuucuuccagaaggguggagacauuaucuagcucauucugcagcuuacuugcuuucuccgccagcuccacccugagccugucgccuucagagaccuuggcauggagcuccuggaccugcgcgucgagcuucuuccucuugugcucagacucagccuugaccugcugcaggaccuucaccucacacgccagcuccuuguuaucugucuccaggcccugcuuguucuucucuagauuugcuuugaaccgcuuggccuguuccagcugcucugagagcuccuccagggcuguugcgugucuuugucucauguccuggauuugagcuucaugguucuuaguuuccuccucaagagcuuucuucagcucugccacuucuuguucacguuuuguacguaguuccugcugggcugccgugguguccagcguguccuccagcucuguuuucagagcuuccaguuccucacucaagucccuuuucugcuuuucggccuuguuccgugaagccuucucggauucaaagucuuccugaaguucagcaauuugggcuuguagcucucgcacaacuuuaagggcauuguucuuauggaguguuucaucaucaccucuggccagugcgcccugcagcuccuccuccuucuuggccagcugcagcuugagcucaucaaucugcgccugcagcucugcgaucugguccugcaggucggucgucuccccgucgaguuuucuuuuggccuuuuccaguuccugacgagucuuuucuuccuucuuuaagcguucuucuaaaucugagaucaucacuucuugcuuauuccugauuuuggccaaguuuuucgccuuuucuuccucuucagccagcugagaggaacacucagcaaugcgaucuuccaugaguuucuuuucuuugaugaacuuggaauuuugguccucgagaagcagaaucuccucuuccaucuucuugaucuuggccucugcugucaccuuuuccagcugcagcuuuugccgagccccuuccuccucgucuagcuguucuuccagguccugaauaugugcuugcauuuuuuucuuuucauuuuggaggauuugguuucuuucuucuucuucuucaacccuagacuccaagucauguagaaucucuucuaauuccugcuuuuuagcagcaagucuugcccucaucucuucugcuucagcaaagagcucagucucugcuuguaguuguucugcaaggauauucuucucuucuaaaagcugcuggugcuuccgcuccaucuccuccagcucuccuuccaccuucgucugcuucuccuucaccuucaacagcucuucaucuuuggccugaaguucuuccuccuggcgagucacuuguagaagcggcuucaccuuugugaagacucgccaccacugccagugccguaauuucagguacgcggcacaguuccgcugcaagaccuuuaaggcacuuaguugcugcugcuucuuggcaaaggccuuucuggccagguaaccucugcaaacggccuggaagaagauaaugauaucggugauuuuuaaaucucuuucuuccucuaagugugccagaacuccagcucugaaaaauaucuugcucuguccaauucuguacaaguuuggguccaauucuaaagcccggaucauucguucacaggccuguuuaccauccauaaaaccuuuaggaauagcauuuggaguuaggaucucauaucucugucugaauuccuggaaaacuauucgguuagggaagcccuggcgacagauucggaucccuuccaggacaccguuacagcgaagcugaucuaggacuagguguggauccaauuuuccagcccucuucucgugauuuggaaugauacaacgaacaaaguuaggguugguguuucggagaguugccaucagcuuggugagagauucuuuguagaguugcccaacgguacgaaacaugcccuucuugguuuuauaugcggagccaaaagcugucucagucauaccagugacuugauccagacccacgauacgguccacaucuuuccaaagcucugccacaaaucugucugaugacuggugcaaaaggguggccacguugucauucaggggguccauauucuucaucagccacucaucugccuuauaguccaccuucccugcauaauguauaaugcaaaaaucagcuuugucuuuuaauugucgagguuucugaaacuuggagugggaaccuugcucuugaaccaguuuuucaacaaagguuuuaucuguggcuuuagggaaccagcauucuucauccaaaagggccaguacaccaggaggguucgcaggucucucuauuaggucgaugcauggcugcagauccagcccgaaaucgaugaaguuccacucgaugccuucgcgcugguauuccucuuguucuaggauaaacauggugugguugaacagcugcugcagcuucucauugguguaguugaugcaaaguuguucaaaggaguucagcucaaaaauuucaaauccagcaauauccaggauuccaaugaaagaugcucccugacguuugguccuauccagagcuuuauugaugcgaugaacgagccagcgaaagagccgcucauagguagcuuuugccaaugcuucuacugcaaaaucugccuguucuuuggucugggcuuuuugcacauagucucggccgaccuugauccggggagucaggauggcccgaguaaacuccaucacauucaucccaagaagauggcagagcuucugcgcaacuguauuuucuggcauggaagcuugaucaguauuucucuccuuuuugaaagaaauauuuccaaacuguagcacugaagauacuacuuuaagcauugacagaaucucuucaugggagaagcccauuaugugcauugcuuccauggucuccuggaaauuaucuuugucuugcugucccggaauaggaauauagccauuggagagaaaccuguaguuauuaaauccuucaagaagcaaaucagacuuuagguguucuccugcuccagauaacaacugguaaaagauaugaaaaguacguucaucuuuugcuugacgaacagcacgagacuuuuccagaagguauguuucaauguuggccccaacgauauagccaguuacaucaaaguugauccgaauaaauuugccaaaacgagaugaguuaucauuuuucacagucuucgcauuuccaaaugauuccagaauuggauuugcuugcaaaagcugccguucaaguuccccaggaauauuaugguccuuucuuccuuuaugugaagaagcaacaugggcaagguacugaauaacuuucuuuguauuuucugucuucccagcaccugacucacccgugcaaagaauugacugguccucacgaucuugaagcaugcaucuguaagcagauucagauauagcauagauguguggaggcaucucaugacgcuucuucccucuguacauuucaauaauauucucagaguaaauuggaagauucuuguaaggguuuauaacuacacagaagaguccagaauaagucuccugaaacagugaggacaucucacagaccagacaggagcuggggcucugcaucucacagcggugccugucagacaggaagaagucccgcagaaguggcgugugggucagggccugcacgaugcaguucaugaagcauguguucccaagguugaucagcccacgcagaccuauggugcaguucgaggugaucuuucuccuuuucggguugugcuucagcaguucaagcucccguuugguugguucccaaguugaaaacuucucuccaacgccuugcauuuuccaagcuuuucgcugcuccuccuuggcgauuauuuccaugucuuugucauagauguaguccuggcacagaaaacaguagaugccuccguacaucagaucaauggccagguugugccgcuucgccuucgcaugcucgugaauaugcuucuuugugaaacagccgaagaagacacaguagaggcaggaaugcagccuguugagguggacgccacagacauggcagauacaggacuuggccuggcucgggcccugcagugccguggcccggggcuggaacugccugccaacugccugguaggcgcugcccccggccgcaagcuggggcgccuccugucgggagcccgcugauagugagggccaacccggcgccau

SEQ ID NO: 2165 - RNA, 8072 nt, Homo sapiens
uucacaugauuauucuuguuuauugaggucucuuuauucuccacgggugcuuuuuucuucaaguaaacagagcaggcgcaaauaucuauaaugaauaaauuuauugucuuacaaaaaucauugucuagaaauaugggaauacaagaaaagauauuugcggucaggugucugguggucaacagccaguacaguucauaaagggggaaaauccaagauuccaaacccacaggacaaauucuuccuaauagauguuaaagcuuuuaacccaaaagguuuguguuuucaagcacauugcagaggaucaaggauuuagaauuaacacugauucauugucacugaaugucuguaauaccacuuugacuagagagguacaugauaugaagcacagucaaaacugaauacauuaaauuguuauagaggcgaaugauauauucaacauugucuuaguacuguagugucuaaggcacuuuccguaaugucaguuugcuuaacuaccaaccaaaaacaggaugcuaaguguucacuguaacacuguccaaagggaagggagaaggaaaaaugaaggagucacacccacuggcaugucaacauucaggaagauggcaucuguucuggaggcuccauaaaccucauugacaaacuuggaacaagccucggacacaaaaccaauauucccauuuugggcucaaagcagcggcugaauuugcaaggucagcaugagggcccggcuggcgauggggaggggccuuccaccagcucggcuuagggguccacggcugcuugcuccugacgugaggagggcgccggcagagccaggcgguucgggagaccaucuggaagucuacaugauccauggcugccaccuggggccucagcugcaguguggccacuaucccuucuaugcacagaccagcccucgccaaggccaguucacaugaguagaugcgggacaccaucgacucgaggggcagggccccccuugggggauggacaugguaaccccaaauggguguugcuuccgauccagcccaccccuccuacucuuuccaaagccccuuucacaguuugcucacugaaauagcauugaucauuauuugaaggaaaugagagagacaagugcaguuuagaguccacaguggucuaggagacuugauguggcugaggagucgggggccacgugaacacagaacuagguuaccugucuguaugacagagagcaugcagagcgacugagugacgaccacggcgcugccccaauaacccagcgacccgcaaccaagggccuggaguuuguuuuaaaaagggucuuaccauguuuuauaaaauggucucuugaugacuauauggaaaauagaugcaaugaugaaacaaucuguuuaauauauguguccugugugugucuauauauaaaaaggggagcaauuguaccuaagucugaagcaggauacaguaugcauaggcuggagagccuuaagacacaguugaucuuucaggaaggaaucccguagcuugccaauuuccgaaaucugcaggaggccccgggugcauuccuaacugucccacuguauugccuccucuggcuuccugcaacuuuacucugacugggguggcugcgucucguugacaucacuggucuuacuuucugugucaucgucggagagcuccagggaagcuccuucaaggugcagcuggcgccggccagaucggcuggaagagaagcugauggggccaccccgccucagccgguucuucagggugcugaccucgcggcucaggcccucguuggccucgguggcaucauccaguucccgcuggaguuuacgccgagaugcguuggcacgcgucgcuucuucuucugcuuccuccagcuggcguuuaagcugcuucauccgagcguuggccuucuccaucugcucuuuauacugguccgcgugucgacgcucauccucaaccugcaugaagauuucuuucagcuucuucucagugcgacggacuaauuuguuggcggcugcucguuccuuggcuuccugcucaagcugcuccuccagcugcccaaucuuggccuccagggcugagaugguggccuugaacuuagacuugacagcacccucgaguuccugcagcuuggccuucagcuccuuguucugccgcuccaguugcuggcgugcauugucacucuucugggcggcgcugcgcucggcugcuagcucggcguucaguguguccaccuguagaguggucuugcggaagcggucguugagcagcuccauguugcucugcuccucuuccagcuccuccuccagcugugcgauccgagcuuccagacgccgcuucucauccagcagcgcggacuugccagaggcgcuguuggugaucucguccgccagcucaucucucuccugcucggcgugucggcgggcucgcucagaugaggcaaguuccuccugcaauugaaggauuucugcuuccagacucuucaauuucuuuucacucucuuuggauugagcaaaaaucucaucucuggaugcacgagcuucuucuaauucacguugguaauccuucaucugagccuggagcuugcggagcugcuuaaucaccucaucccgagcuuuguucgcagccucgauuugggcuucgagguccuucaggucuaucuccaucuuuuucuuugaagcuacagcaagcgcccgcuguuuccucucauccuccagcuccgccucgagcucccgcaccuguuugaucagcagccgcuucuucucuucauucugcucaucccugguuugcaggucucucucgaacugcgccuucauggccugcauguugaccuccagacgaagcuuggcaucuuccguggccuggaguucgucuuccagcuccuccagcuggguccucauuuccuccaccugcugcucuagggcccguuuggauuuuucaaguucgugaacguuuuuucccacaucaucuuuggagcucaugaggucuuccaugucugcucggagcugcuuguucugccucucaaacuccuccuuggccuccagggcuuccucgagggcccgggccagugacagggcuuugguuucuuucucucuggccucggcuucggcccggucccgcucuucggcauagcgagcagagaugcucuucucuucugcuaacagcuggucaaacuucuucugcuucuucuccaaguuggaggcgaccuggcgcuggugguccagguccaccgugaggucguccagcuccugcugcaggcgguucuuggucuucuccaguuugucauacgccagugccuucuccuccaggcgcuggcucagggccuccgcguccuucagaagcuucuucuuggcuucuuccagacuuucaauuguucccaggucgucaucuacuuucuucuugguaucagccaacugggacugcagggccagcacuugcuucuccagguucuuccuggccuccuccuccuccuccugcugcuccugaagacuguucuucuccucuuccagcugccggauccgacugcucagguuuaguuucuggcgugucuccuccugaagaagcuccuguguauccuguaguugagacucaagacuagcugcauccuuagcaaauuuaauacccuucuucucugcuucuuccagaaggguggagacauuaucuagcucauucugcagcuuacuugcuuucuccgccagcuccacccugagccugucgccuucagagaccuuggcauggagcuccuggaccugcgcgucgagcuucuuccucuugugcucagacucagccuugaccugcugcaggaccuucaccucacacgccagcuccuuguuaucugucuccaggcccugcuuguucuucucuagauuugcuuugaaccgcuuggccuguuccagcugcucugagagcuccuccagggcuguugcgugucuuugucucauguccuggauuugagcuucaugguucuuaguuuccuccucaagagcuuucuucagcucugccacuucuuguucacguuuuguacguaguuccugcugggcugccgugguguccagcguguccuccagcucuguuuucagagcuuccaguuccucacucaagucccuuuucugcuuuucggccuuguuccgugaagccuucucggauucaaagucuuccugaaguucagcaauuugggcuuguagcucucgcacaacuuuaagggcauuguucuuauggaguguuucaucaucaccucuggccagugcgcccugcagcuccuccuccuucuuggccagcugcagcuugagcucaucaaucugcgccugcagcucugcgaucugguccugcaggucggucgucuccccgucgaguuuucuuuuggccuuuuccaguuccugacgagucuuuucuuccuucuuuaagcguucuucuaaaucugagaucaucacuucuugcuuauuccugauuuuggccaaguuuuucgccuuuucuuccucuucagccagcugagaggaacacucagcaaugcgaucuuccaugaguuucuuuucuuugaugaacuuggaauuuugguccucgagaagcagaaucuccucuuccaucuucuugaucuuggccucugcugucaccuuuuccagcugcagcuuuugccgagccccuuccuccucgucuagcuguucuuccagguccugaauaugugcuugcauuuuuuucuuuucauuuuggaggauuugguuucuuucuucuucuucuucaacccuagacuccaagucauguagaaucucuucuaauuccugcuuuuuagcagcaagucuugcccucaucucuucugcuucagcaaagagcucagucucugcuuguaguuguucugcaaggauauucuucucuucuaaaagcugcuggugcuuccgcuccaucuccuccagcucuccuuccaccuucgucugcuucuccuucaccuucaacagcucuucaucuuuggccugaaguucuuccuccuggcgagucacuuguagaagcggcuucaccuuugugaagacucgccaccacugccagugccguaauuucagguacgcggcacaguuccgcugcaagaccuuuaaggcacuuaguugcugcugcuucuuggcaaaggccuuucuggccagguaaccucugcaaacggccuggaagaagauaaugauaucggugauuuuuaaaucucuuucuuccucuaagugugccagaacuccagcucugaaaaauaucuugcucuguccaauucuguacaaguuuggguccaauucuaaagcccggaucauucguucacaggccuguuuaccauccauaaaaccuuuaggaauagcauuuggaguuaggaucucauaucucugucugaauuccuggaaaacuauucgguuagggaagcccuggcgacagauucggaucccuuccaggacaccguuacagcgaagcugaucuaggacuagguguggauccaauuuuccagcccucuucucgugauuuggaaugauacaacgaacaaaguuaggguugguguuucggagaguugccaucagcuuggugagagauucuuuguagaguugcccaacgguacgaaacaugcccuucuugguuuuauaugcggagccaaaagcugucucagucauaccagugacuugauccagacccacgauacgguccacaucuuuccaaagcucugccacaaaucugucugaugacuggugcaaaaggguggccacguugucauucaggggguccauauucuucaucagccacucaucugccuuauaguccaccuucccugcauaauguauaaugcaaaaaucagcuuugucuuuuaauugucgagguuucugaaacuuggagugggaaccuugcucuugaaccaguuuuucaacaaagguuuuaucuguggcuuuagggaaccagcauucuucauccaaaagggccaguacaccaggaggguucgcaggucucucuauuaggucgaugcauggcugcagauccagcccgaaaucgaugaaguuccacucgaugccuucgcgcugguauuccucuuguucuaggauaaacauggugugguugaacagcugcugcagcuucucauugguguaguugaugcaaaguuguucaaaggaguucagcucaaaaauuucaaauccagcaauauccaggauuccaaugaaagaugcucccugacguuugguccuauccagagcuuuauugaugcgaugaacgagccagcgaaagagccgcucauagguagcuuuugccaaugcuucuacugcaaaaucugccuguucuuuggucugggcuuuuugcacauagucucggccgaccuugauccggggagucaggauggcccgaguaaacuccaucacauucaucccaagaagauggcagagcuucugcgcaacuguauuuucuggcauggaagcuugaucaguauuucucuccuuuuugaaagaaauauuuccaaacuguagcacugaagauacuacuuuaagcauugacagaaucucuucaugggagaagcccauuaugugcauugcuuccauggucuccuggaaauuaucuuugucuugcugucccggaauaggaauauagccauuggagagaaaccuguaguuauuaaauccuucaagaagcaaaucagacuuuagguguucuccugcuccagauaacaacugguaaaagauaugaaaaguacguucaucuuuugcuugacgaacagcacgagacuuuuccagaagguauguuucaauguuggccccaacgauauagccaguuacaucaaaguugauccgaauaaauuugccaaaacgagaugaguuaucauuuuucacagucuucgcauuuccaaaugauuccagaauuggauuugcuugcaaaagcugccguucaaguuccccaggaauauuaugguccuuucuuccuuuaugugaagaagcaacaugggcaagguacugaauaacuuucuuuguauuuucugucuucccagcaccugacucacccgugcaaagaauugacugguccucacgaucuugaagcaugcaucuguaagcagauucagauauagcauagauguguggaggcaucucaugacgcuucuucccucuguacauuucaauaauauucucagaguaaauuggaagauucuuguaaggguuuauaacuacacagaagaguccagaauaagucuccugaaacagugaggacaucucacagaccagacaggagcuggggcucugcaucucacagcggugccugucagacaggaagaagucccgcagaaguggcgugugggucagggccugcacgaugcaguucaugaagcauguguucccaagguugaucagcccacgcagaccuauggugcaguucgaggugaucuuucuccuuuucggguugugcuucagcaguucaagcucccguuugguugguucccaaguugaaaacuucucuccaacgccuugcauuuuccaagcuuuucgcugcuccuccuuggcgauuauuuccaugucuuugucauagauguaguccuggcacagaaaacaguagaugccuccguacaucagaucaauggccagguugugccgcuucgccuucgcaugcucgugaauaugcuucuuugugaaacagccgaagaagacacaguagaggcaggaaugcagccuguugagguggacgccacagacauggcagauacaggacuuggccuugcgcuugcgggccucagccgugccgcuccacacgaagcacugguagauggcccgcagguucugcuuccaguuguccaccuugaagcugcccaggugcgagcagcccggcggcgcuaccgccagcucggcguccauggccucgcccucgggcucuggccgggacaccauggggggcaaggcccggccgcgcgcggggggcggcggcgagggaggcgaggacgacgccagcgcggcgugggggcugcucggcggcuggccaggcuggccaaggcccgggcgccgagaacaaagcgcggaggccggacaaagauggggcugcgcgaucgccgaggggaggcugcaaggcaggcaccgcccccgagcugcggcugc

SEQ ID NO: 2166 - RNA, 7925 nt, Homo sapiens
uucacaugauuauucuuguuuauugaggucucuuuauucuccacgggugcuuuuuucuucaaguaaacagagcaggcgcaaauaucuauaaugaauaaauuuauugucuuacaaaaaucauugucuagaaauaugggaauacaagaaaagauauuugcggucaggugucugguggucaacagccaguacaguucauaaagggggaaaauccaagauuccaaacccacaggacaaauucuuccuaauagauguuaaagcuuuuaacccaaaagguuuguguuuucaagcacauugcagaggaucaaggauuuagaauuaacacugauucauugucacugaaugucuguaauaccacuuugacuagagagguacaugauaugaagcacagucaaaacugaauacauuaaauuguuauagaggcgaaugauauauucaacauugucuuaguacuguagugucuaaggcacuuuccguaaugucaguuugcuuaacuaccaaccaaaaacaggaugcuaaguguucacuguaacacuguccaaagggaagggagaaggaaaaaugaaggagucacacccacuggcaugucaacauucaggaagauggcaucuguucuggaggcuccauaaaccucauugacaaacuuggaacaagccucggacacaaaaccaauauucccauuuugggcucaaagcagcggcugaauuugcaaggucagcaugagggcccggcuggcgauggggaggggccuuccaccagcucggcuuagggguccacggcugcuugcuccugacgugaggagggcgccggcagagccaggcgguucgggagaccaucuggaagucuacaugauccauggcugccaccuggggccucagcugcaguguggccacuaucccuucuaugcacagaccagcccucgccaaggccaguucacaugaguagaugcgggacaccaucgacucgaggggcagggccccccuugggggauggacaugguaaccccaaauggguguugcuuccgauccagcccaccccuccuacucuuuccaaagccccuuucacaguuugcucacugaaauagcauugaucauuauuugaaggaaaugagagagacaagugcaguuuagaguccacaguggucuaggagacuugauguggcugaggagucgggggccacgugaacacagaacuagguuaccugucuguaugacagagagcaugcagagcgacugagugacgaccacggcgcugccccaauaacccagcgacccgcaaccaagggccuggaguuuguuuuaaaaagggucuuaccauguuuuauaaaauggucucuugaugacuauauggaaaauagaugcaaugaugaaacaaucuguuuaauauauguguccugugugugucuauauauaaaaaggggagcaauuguaccuaagucugaagcaggauacaguaugcauaggcuggagagccuuaagacacaguugaucuuucaggaaggaaucccguagcuugccaauuuccgaaaucugcaggaggccccgggugcauuccuaacugucccacuguauugccuccucuggcuuccugcaacuuuacucugacugggguggcugcgucucguugacaucacuggucuuacuuucugugucaucgucggagagcuccagggaagcuccuucaaggugcagcuggcgccggccagaucggcuggaagagaagcugauggggccaccccgccucagccgguucuucagggugcugaccucgcggcucaggcccucguuggccucgguggcaucauccaguucccgcuggaguuuacgccgagaugcguuggcacgcgucgcuucuucuucugcuuccuccagcuggcguuuaagcugcuucauccgagcguuggccuucuccaucugcucuuuauacugguccgcgugucgacgcucauccucaaccugcaugaagauuucuuucagcuucuucucagugcgacggacuaauuuguuggcggcugcucguuccuuggcuuccugcucaagcugcuccuccagcugcccaaucuuggccuccagggcugagaugguggccuugaacuuagacuugacagcacccucgaguuccugcagcuuggccuucagcuccuuguucugccgcuccaguugcuggcgugcauugucacucuucugggcggcgcugcgcucggcugcuagcucggcguucaguguguccaccuguagaguggucuugcggaagcggucguugagcagcuccauguugcucugcuccucuuccagcuccuccuccagcugugcgauccgagcuuccagacgccgcuucucauccagcagcgcggacuugccagaggcgcuguuggugaucucguccgccagcucaucucucuccugcucggcgugucggcgggcucgcucagaugaggcaaguuccuccugcaauugaaggauuucugcuuccagacucuucaauuucuuuucacucucuuuggauugagcaaaaaucucaucucuggaugcacgagcuucuucuaauucacguugguaauccuucaucugagccuggagcuugcggagcugcuuaaucaccucaucccgagcuuuguucgcagccucgauuugggcuucgagguccuucaggucuaucuccaucuuuuucuuugaagcuacagcaagcgcccgcuguuuccucucauccuccagcuccgccucgagcucccgcaccuguuugaucagcagccgcuucuucucuucauucugcucaucccugguuugcaggucucucucgaacugcgccuucauggccugcauguugaccuccagacgaagcuuggcaucuuccguggccuggaguucgucuuccagcuccuccagcuggguccucauuuccuccaccugcugcucuagggcccguuuggauuuuucaaguucgugaacguuuuuucccacaucaucuuuggagcucaugaggucuuccaugucugcucggagcugcuuguucugccucucaaacuccuccuuggccuccagggcuuccucgagggcccgggccagugacagggcuuugguuucuuucucucuggccucggcuucggcccggucccgcucuucggcauagcgagcagagaugcucuucucuucugcuaacagcuggucaaacuucuucugcuucuucuccaaguuggaggcgaccuggcgcuggugguccagguccaccgugaggucguccagcuccugcugcaggcgguucuuggucuucuccaguuugucauacgccagugccuucuccuccaggcgcuggcucagggccuccgcguccuucagaagcuucuucuuggcuucuuccagacuuucaauuguucccaggucgucaucuacuuucuucuugguaucagccaacugggacugcagggccagcacuugcuucuccagguucuuccuggccuccuccuccuccuccugcugcuccugaagacuguucuucuccucuuccagcugccggauccgacugcucagguuuaguuucuggcgugucuccuccugaagaagcuccuguguauccuguaguugagacucaagacuagcugcauccuuagcaaauuuaauacccuucuucucugcuucuuccagaaggguggagacauuaucuagcucauucugcagcuuacuugcuuucuccgccagcuccacccugagccugucgccuucagagaccuuggcauggagcuccuggaccugcgcgucgagcuucuuccucuugugcucagacucagccuugaccugcugcaggaccuucaccucacacgccagcuccuuguuaucugucuccaggcccugcuuguucuucucuagauuugcuuugaaccgcuuggccuguuccagcugcucugagagcuccuccagggcuguugcgugucuuugucucauguccuggauuugagcuucaugguucuuaguuuccuccucaagagcuuucuucagcucugccacuucuuguucacguuuuguacguaguuccugcugggcugccgugguguccagcguguccuccagcucuguuuucagagcuuccaguuccucacucaagucccuuuucugcuuuucggccuuguuccgugaagccuucucggauucaaagucuuccugaaguucagcaauuugggcuuguagcucucgcacaacuuuaagggcauuguucuuauggaguguuucaucaucaccucuggccagugcgcccugcagcuccuccuccuucuuggccagcugcagcuugagcucaucaaucugcgccugcagcucugcgaucugguccugcaggucggucgucuccccgucgaguuuucuuuuggccuuuuccaguuccugacgagucuuuucuuccuucuuuaagcguucuucuaaaucugagaucaucacuucuugcuuauuccugauuuuggccaaguuuuucgccuuuucuuccucuucagccagcugagaggaacacucagcaaugcgaucuuccaugaguuucuuuucuuugaugaacuuggaauuuugguccucgagaagcagaaucuccucuuccaucuucuugaucuuggccucugcugucaccuuuuccagcugcagcuuuugccgagccccuuccuccucgucuagcuguucuuccagguccugaauaugugcuugcauuuuuuucuuuucauuuuggaggauuugguuucuuucuucuucuucuucaacccuagacuccaagucauguagaaucucuucuaauuccugcuuuuuagcagcaagucuugcccucaucucuucugcuucagcaaagagcucagucucugcuuguaguuguucugcaaggauauucuucucuucuaaaagcugcuggugcuuccgcuccaucuccuccagcucuccuuccaccuucgucugcuucuccuucaccuucaacagcucuucaucuuuggccugaaguucuuccuccuggcgagucacuuguagaagcggcuucaccuuugugaagacucgccaccacugccagugccguaauuucagguacgcggcacaguuccgcugcaagaccuuuaaggcacuuaguugcugcugcuucuuggcaaaggccuuucuggccagguaaccucugcaaacggccuggaagaagauaaugauaucggugauuuuuaaaucucuuucuuccucuaagugugccagaacuccagcucugaaaaauaucuugcucuguccaauucuguacaaguuuggguccaauucuaaagcccggaucauucguucacaggccuguuuaccauccauaaaaccuuuaggaauagcauuuggaguuaggaucucauaucucugucugaauuccuggaaaacuauucgguuagggaagcccuggcgacagauucggaucccuuccaggacaccguuacagcgaagcugaucuaggacuagguguggauccaauuuuccagcccucuucucgugauuuggaaugauacaacgaacaaaguuaggguugguguuucggagaguugccaucagcuuggugagagauucuuuguagaguugcccaacgguacgaaacaugcccuucuugguuuuauaugcggagccaaaagcugucucagucauaccagugacuugauccagacccacgauacgguccacugguggcucaugaagaccagaaacacugucauagaaagaagcucucugaauauucugaaucucaucuuuccaaagcucugccacaaaucugucugaugacuggugcaaaaggguggccacguugucauucaggggguccauauucuucaucagccacucaucugccuuauaguccaccuucccugcauaauguauaaugcaaaaaucagcuuugucuuuuaauugucgagguuucugaaacuuggagugggaaccuugcucuugaaccaguuuuucaacaaagguuuuaucuguggcuuuagggaaccagcauucuucauccaaaagggccaguacaccaggaggguucgcaggucucucuauuaggucgaugcauggcugcagauccagcccgaaaucgaugaaguuccacucgaugccuucgcgcugguauuccucuuguucuaggauaaacauggugugguugaacagcugcugcagcuucucauugguguaguugaugcaaaguuguucaaaggaguucagcucaaaaauuucaaauccagcaauauccaggauuccaaugaaagaugcucccugacguuugguccuauccagagcuuuauugaugcgaugaacgagccagcgaaagagccgcucauagguagcuuuugccaaugcuucuacugcaaaaucugccuguucuuuggucugggcuuuuugcacauagucucggccgaccuugauccggggagucaggauggcccgaguaaacuccaucacauucaucccaagaagauggcagagcuucugcgcaacuguauuuucuggcauggaagcuugaucaguauuucucuccuuuuugaaagaaauauuuccaaacuguagcacugaagauacuacuuuaagcauugacagaaucucuucaugggagaagcccauuaugugcauugcuuccauggucuccuggaaauuaucuuugucuugcugucccggaauaggaauauagccauuggagagaaaccuguaguuauuaaauccuucaagaagcaaaucagacuuuagguguucuccugcuccagauaacaacugguaaaagauaugaaaaguacguucaucuuuugcuugacgaacagcacgagacuuuuccagaagguauguuucaauguuggccccaacgauauagccaguuacaucaaaguugauccgaauaaauuugccaaaacgagaugaguuaucauuuuucacagucuucgcauuuccaaaugauuccagaauuggauuugcuugcaaaagcugccguucaaguucccccugguguuucacugguuuaggcgauuccugaggaauauuaugguccuuucuuccuuuaugugaagaagcaacaugggcaagguacugaauaacuuucuuuguauuuucugucuucccagcaccugacucacccgugcaaagaauugacugguccucacgaucuugaagcaugcaucuguaagcagauucagauauagcauagauguguggaggcaucucaugacgcuucuucccucuguacauuucaauaauauucucagaguaaauuggaagauucuuguaaggguuuauaacuacacagaagaguccagaauaagucuccugaaacagugaggacaucucacagaccagacaggagcuggggcucugcaucucacagcggugccugucagacaggaagaagucccgcagaaguggcgugugggucagggccugcacgaugcaguucaugaagcauguguucccaagguugaucagcccacgcagaccuauggugcaguucgaggugaucuuucuccuuuucggguugugcuucagcaguucaagcucccguuugguugguucccaaguugaaaacuucucuccaacgccuugcauuuuccaagcuuuucgcugcuccuccuuggcgauuauuuccaugucuuugucauagauguaguccuggcacagaaaacaguagaugccuccguacaucagaucaauggccagguugugccgcuucgccuucgcaugcucgugaauaugcuucuuugugaaacagccgaagaagacacaguagaggcaggaaugcagccuguugagguggacgccacagacauggcagauacaggacuuggccuggcucgggcccugcagugccguggcccggggcuggaacugccugccaacugccugguaggcgcugcccccggccgcaagcuggggcgccuccugucgggagcccgcugauagugagggccaacccggcgccau

SEQ ID NO: 2167 - RNA, 8230 nt, Homo sapiens
uucacaugauuauucuuguuuauugaggucucuuuauucuccacgggugcuuuuuucuucaaguaaacagagcaggcgcaaauaucuauaaugaauaaauuuauugucuuacaaaaaucauugucuagaaauaugggaauacaagaaaagauauuugcggucaggugucugguggucaacagccaguacaguucauaaagggggaaaauccaagauuccaaacccacaggacaaauucuuccuaauagauguuaaagcuuuuaacccaaaagguuuguguuuucaagcacauugcagaggaucaaggauuuagaauuaacacugauucauugucacugaaugucuguaauaccacuuugacuagagagguacaugauaugaagcacagucaaaacugaauacauuaaauuguuauagaggcgaaugauauauucaacauugucuuaguacuguagugucuaaggcacuuuccguaaugucaguuugcuuaacuaccaaccaaaaacaggaugcuaaguguucacuguaacacuguccaaagggaagggagaaggaaaaaugaaggagucacacccacuggcaugucaacauucaggaagauggcaucuguucuggaggcuccauaaaccucauugacaaacuuggaacaagccucggacacaaaaccaauauucccauuuugggcucaaagcagcggcugaauuugcaaggucagcaugagggcccggcuggcgauggggaggggccuuccaccagcucggcuuagggguccacggcugcuugcuccugacgugaggagggcgccggcagagccaggcgguucgggagaccaucuggaagucuacaugauccauggcugccaccuggggccucagcugcaguguggccacuaucccuucuaugcacagaccagcccucgccaaggccaguucacaugaguagaugcgggacaccaucgacucgaggggcagggccccccuugggggauggacaugguaaccccaaauggguguugcuuccgauccagcccaccccuccuacucuuuccaaagccccuuucacaguuugcucacugaaauagcauugaucauuauuugaaggaaaugagagagacaagugcaguuuagaguccacaguggucuaggagacuugauguggcugaggagucgggggccacgugaacacagaacuagguuaccugucuguaugacagagagcaugcagagcgacugagugacgaccacggcgcugccccaauaacccagcgacccgcaaccaagggccuggaguuuguuuuaaaaagggucuuaccauguuuuauaaaauggucucuugaugacuauauggaaaauagaugcaaugaugaaacaaucuguuuaauauauguguccugugugugucuauauauaaaaaggggagcaauuguaccuaagucugaagcaggauacaguaugcauaggcuggagagccuuaagacacaguugaucuuucaggaaggaaucccguagcuugccaauuuccgaaaucugcaggaggccccgggugcauuccuaacugucccacuguauugccuccucuggcuuccugcaacuuuacucugacugggguggcugcgucucguugacaucacuggucuuacuuucugugucaucgucggagagcuccagggaagcuccuucaaggugcagcuggcgccggccagaucggcuggaagagaagcugauggggccaccccgccucagccgguucuucagggugcugaccucgcggcucaggcccucguuggccucgguggcaucauccaguucccgcuggaguuuacgccgagaugcguuggcacgcgucgcuucuucuucugcuuccuccagcuggcguuuaagcugcuucauccgagcguuggccuucuccaucugcucuuuauacugguccgcgugucgacgcucauccucaaccugcaugaagauuucuuucagcuucuucucagugcgacggacuaauuuguuggcggcugcucguuccuuggcuuccugcucaagcugcuccuccagcugcccaaucuuggccuccagggcugagaugguggccuugaacuuagacuugacagcacccucgaguuccugcagcuuggccuucagcuccuuguucugccgcuccaguugcuggcgugcauugucacucuucugggcggcgcugcgcucggcugcuagcucggcguucaguguguccaccuguagaguggucuugcggaagcggucguugagcagcuccauguugcucugcuccucuuccagcuccuccuccagcugugcgauccgagcuuccagacgccgcuucucauccagcagcgcggacuugccagaggcgcuguuggugaucucguccgccagcucaucucucuccugcucggcgugucggcgggcucgcucagaugaggcaaguuccuccugcaauugaaggauuucugcuuccagacucuucaauuucuuuucacucucuuuggauugagcaaaaaucucaucucuggaugcacgagcuucuucuaauucacguugguaauccuucaucugagccuggagcuugcggagcugcuuaaucaccucaucccgagcuuuguucgcagccucgauuugggcuucgagguccuucaggucuaucuccaucuuuuucuuugaagcuacagcaagcgcccgcuguuuccucucauccuccagcuccgccucgagcucccgcaccuguuugaucagcagccgcuucuucucuucauucugcucaucccugguuugcaggucucucucgaacugcgccuucauggccugcauguugaccuccagacgaagcuuggcaucuuccguggccuggaguucgucuuccagcuccuccagcuggguccucauuuccuccaccugcugcucuagggcccguuuggauuuuucaaguucgugaacguuuuuucccacaucaucuuuggagcucaugaggucuuccaugucugcucggagcugcuuguucugccucucaaacuccuccuuggccuccagggcuuccucgagggcccgggccagugacagggcuuugguuucuuucucucuggccucggcuucggcccggucccgcucuucggcauagcgagcagagaugcucuucucuucugcuaacagcuggucaaacuucuucugcuucuucuccaaguuggaggcgaccuggcgcuggugguccagguccaccgugaggucguccagcuccugcugcaggcgguucuuggucuucuccaguuugucauacgccagugccuucuccuccaggcgcuggcucagggccuccgcguccuucagaagcuucuucuuggcuucuuccagacuuucaauuguucccaggucgucaucuacuuucuucuugguaucagccaacugggacugcagggccagcacuugcuucuccagguucuuccuggccuccuccuccuccuccugcugcuccugaagacuguucuucuccucuuccagcugccggauccgacugcucagguuuaguuucuggcgugucuccuccugaagaagcuccuguguauccuguaguugagacucaagacuagcugcauccuuagcaaauuuaauacccuucuucucugcuucuuccagaaggguggagacauuaucuagcucauucugcagcuuacuugcuuucuccgccagcuccacccugagccugucgccuucagagaccuuggcauggagcuccuggaccugcgcgucgagcuucuuccucuugugcucagacucagccuugaccugcugcaggaccuucaccucacacgccagcuccuuguuaucugucuccaggcccugcuuguucuucucuagauuugcuuugaaccgcuuggccuguuccagcugcucugagagcuccuccagggcuguugcgugucuuugucucauguccuggauuugagcuucaugguucuuaguuuccuccucaagagcuuucuucagcucugccacuucuuguucacguuuuguacguaguuccugcugggcugccgugguguccagcguguccuccagcucuguuuucagagcuuccaguuccucacucaagucccuuuucugcuuuucggccuuguuccgugaagccuucucggauucaaagucuuccugaaguucagcaauuugggcuuguagcucucgcacaacuuuaagggcauuguucuuauggaguguuucaucaucaccucuggccagugcgcccugcagcuccuccuccuucuuggccagcugcagcuugagcucaucaaucugcgccugcagcucugcgaucugguccugcaggucggucgucuccccgucgaguuuucuuuuggccuuuuccaguuccugacgagucuuuucuuccuucuuuaagcguucuucuaaaucugagaucaucacuucuugcuuauuccugauuuuggccaaguuuuucgccuuuucuuccucuucagccagcugagaggaacacucagcaaugcgaucuuccaugaguuucuuuucuuugaugaacuuggaauuuugguccucgagaagcagaaucuccucuuccaucuucuugaucuuggccucugcugucaccuuuuccagcugcagcuuuugccgagccccuuccuccucgucuagcuguucuuccagguccugaauaugugcuugcauuuuuuucuuuucauuuuggaggauuugguuucuuucuucuucuucuucaacccuagacuccaagucauguagaaucucuucuaauuccugcuuuuuagcagcaagucuugcccucaucucuucugcuucagcaaagagcucagucucugcuuguaguuguucugcaaggauauucuucucuucuaaaagcugcuggugcuuccgcuccaucuccuccagcucuccuuccaccuucgucugcuucuccuucaccuucaacagcucuucaucuuuggccugaaguucuuccuccuggcgagucacuuguagaagcggcuucaccuuugugaagacucgccaccacugccagugccguaauuucagguacgcggcacaguuccgcugcaagaccuuuaaggcacuuaguugcugcugcuucuuggcaaaggccuuucuggccagguaaccucugcaaacggccuggaagaagauaaugauaucggugauuuuuaaaucucuuucuuccucuaagugugccagaacuccagcucugaaaaauaucuugcucuguccaauucuguacaaguuuggguccaauucuaaagcccggaucauucguucacaggccuguuuaccauccauaaaaccuuuaggaauagcauuuggaguuaggaucucauaucucugucugaauuccuggaaaacuauucgguuagggaagcccuggcgacagauucggaucccuuccaggacaccguuacagcgaagcugaucuaggacuagguguggauccaauuuuccagcccucuucucgugauuuggaaugauacaacgaacaaaguuaggguugguguuucggagaguugccaucagcuuggugagagauucuuuguagaguugcccaacgguacgaaacaugcccuucuugguuuuauaugcggagccaaaagcugucucagucauaccagugacuugauccagacccacgauacgguccacugguggcucaugaagaccagaaacacugucauagaaagaagcucucugaauauucugaaucucaucuuuccaaagcucugccacaaaucugucugaugacuggugcaaaaggguggccacguugucauucaggggguccauauucuucaucagccacucaucugccuuauaguccaccuucccugcauaauguauaaugcaaaaaucagcuuugucuuuuaauugucgagguuucugaaacuuggagugggaaccuugcucuugaaccaguuuuucaacaaagguuuuaucuguggcuuuagggaaccagcauucuucauccaaaagggccaguacaccaggaggguucgcaggucucucuauuaggucgaugcauggcugcagauccagcccgaaaucgaugaaguuccacucgaugccuucgcgcugguauuccucuuguucuaggauaaacauggugugguugaacagcugcugcagcuucucauugguguaguugaugcaaaguuguucaaaggaguucagcucaaaaauuucaaauccagcaauauccaggauuccaaugaaagaugcucccugacguuugguccuauccagagcuuuauugaugcgaugaacgagccagcgaaagagccgcucauagguagcuuuugccaaugcuucuacugcaaaaucugccuguucuuuggucugggcuuuuugcacauagucucggccgaccuugauccggggagucaggauggcccgaguaaacuccaucacauucaucccaagaagauggcagagcuucugcgcaacuguauuuucuggcauggaagcuugaucaguauuucucuccuuuuugaaagaaauauuuccaaacuguagcacugaagauacuacuuuaagcauugacagaaucucuucaugggagaagcccauuaugugcauugcuuccauggucuccuggaaauuaucuuugucuugcugucccggaauaggaauauagccauuggagagaaaccuguaguuauuaaauccuucaagaagcaaaucagacuuuagguguucuccugcuccagauaacaacugguaaaagauaugaaaaguacguucaucuuuugcuugacgaacagcacgagacuuuuccagaagguauguuucaauguuggccccaacgauauagccaguuacaucaaaguugauccgaauaaauuugccaaaacgagaugaguuaucauuuuucacagucuucgcauuuccaaaugauuccagaauuggauuugcuugcaaaagcugccguucaaguucccccugguguuucacugguuuaggcgauuccugaggaauauuaugguccuuucuuccuuuaugugaagaagcaacaugggcaagguacugaauaacuuucuuuguauuuucugucuucccagcaccugacucacccgugcaaagaauugacugguccucacgaucuugaagcaugcaucuguaagcagauucagauauagcauagauguguggaggcaucucaugacgcuucuucccucuguacauuucaauaauauucucagaguaaauuggaagauucuuguaaggguuuauaacuacacagaagaguccagaauaagucuccugaaacagugaggacaucucacagaccagacaggagcuggggcucugcaucucacagcggugccugucagacaggaagaagucccgcagaaguggcgugugggucagggccugcacgaugcaguucaugaagcauguguucccaagguugaucagcccacgcagaccuauggugcaguucgaggugaucuuucuccuuuucggguugugcuucagcaguucaagcucccguuugguugguucccaaguugaaaacuucucuccaacgccuugcauuuuccaagcuuuucgcugcuccuccuuggcgauuauuuccaugucuuugucauagauguaguccuggcacagaaaacaguagaugccuccguacaucagaucaauggccagguugugccgcuucgccuucgcaugcucgugaauaugcuucuuugugaaacagccgaagaagacacaguagaggcaggaaugcagccuguugagguggacgccacagacauggcagauacaggacuuggccuucggcuauugucauaggcucucaguauaguccgucugguacagagccgccucccgggacccuggcggcuagacguucccugucucuuccagaggacuggggaggcgggggcgugcugcgguugggcggcgcgagacgucaguccuagcacugaaccgguuugcgccggccugagcucugccgcaaagaggcggggcgaugagcuggagcgccgcaggucgggccuccauccagggccugcgcuuucccacccaaaagcacccccuaaucgggagcuguuugcagggcccccgguugccguaaccuggcucgggcccugcagugccguggcccggggcuggaacugccugccaacugccugguaggcgcugcccccggccgcaagcuggggcgccuccugucgggagcccgcugauagugagggccaacccggcgccau

SEQ ID NO: 2168 - RNA, 8137 nt, Homo sapiens
uucacaugauuauucuuguuuauugaggucucuuuauucuccacgggugcuuuuuucuucaaguaaacagagcaggcgcaaauaucuauaaugaauaaauuuauugucuuacaaaaaucauugucuagaaauaugggaauacaagaaaagauauuugcggucaggugucugguggucaacagccaguacaguucauaaagggggaaaauccaagauuccaaacccacaggacaaauucuuccuaauagauguuaaagcuuuuaacccaaaagguuuguguuuucaagcacauugcagaggaucaaggauuuagaauuaacacugauucauugucacugaaugucuguaauaccacuuugacuagagagguacaugauaugaagcacagucaaaacugaauacauuaaauuguuauagaggcgaaugauauauucaacauugucuuaguacuguagugucuaaggcacuuuccguaaugucaguuugcuuaacuaccaaccaaaaacaggaugcuaaguguucacuguaacacuguccaaagggaagggagaaggaaaaaugaaggagucacacccacuggcaugucaacauucaggaagauggcaucuguucuggaggcuccauaaaccucauugacaaacuuggaacaagccucggacacaaaaccaauauucccauuuugggcucaaagcagcggcugaauuugcaaggucagcaugagggcccggcuggcgauggggaggggccuuccaccagcucggcuuagggguccacggcugcuugcuccugacgugaggagggcgccggcagagccaggcgguucgggagaccaucuggaagucuacaugauccauggcugccaccuggggccucagcugcaguguggccacuaucccuucuaugcacagaccagcccucgccaaggccaguucacaugaguagaugcgggacaccaucgacucgaggggcagggccccccuugggggauggacaugguaaccccaaauggguguugcuuccgauccagcccaccccuccuacucuuuccaaagccccuuucacaguuugcucacugaaauagcauugaucauuauuugaaggaaaugagagagacaagugcaguuuagaguccacaguggucuaggagacuugauguggcugaggagucgggggccacgugaacacagaacuagguuaccugucuguaugacagagagcaugcagagcgacugagugacgaccacggcgcugccccaauaacccagcgacccgcaaccaagggccuggaguuuguuuuaaaaagggucuuaccauguuuuauaaaauggucucuugaugacuauauggaaaauagaugcaaugaugaaacaaucuguuuaauauauguguccugugugugucuauauauaaaaaggggagcaauuguaccuaagucugaagcaggauacaguaugcauaggcuggagagccuuaagacacaguugaucuuucaggaaggaaucccguagcuugccaauuuccgaaaucugcaggaggccccgggugcauuccuaacugucccacuguauugccuccucuggcuuccugcaacuuuacucugacugggguggcugcgucucguugacaucacuggucuuacuuucugugucaucgucggagagcuccagggaagcuccuucaaggugcagcuggcgccggccagaucggcuggaagagaagcugauggggccaccccgccucagccgguucuucagggugcugaccucgcggcucaggcccucguuggccucgguggcaucauccaguucccgcuggaguuuacgccgagaugcguuggcacgcgucgcuucuucuucugcuuccuccagcuggcguuuaagcugcuucauccgagcguuggccuucuccaucugcucuuuauacugguccgcgugucgacgcucauccucaaccugcaugaagauuucuuucagcuucuucucagugcgacggacuaauuuguuggcggcugcucguuccuuggcuuccugcucaagcugcuccuccagcugcccaaucuuggccuccagggcugagaugguggccuugaacuuagacuugacagcacccucgaguuccugcagcuuggccuucagcuccuuguucugccgcuccaguugcuggcgugcauugucacucuucugggcggcgcugcgcucggcugcuagcucggcguucaguguguccaccuguagaguggucuugcggaagcggucguugagcagcuccauguugcucugcuccucuuccagcuccuccuccagcugugcgauccgagcuuccagacgccgcuucucauccagcagcgcggacuugccagaggcgcuguuggugaucucguccgccagcucaucucucuccugcucggcgugucggcgggcucgcucagaugaggcaaguuccuccugcaauugaaggauuucugcuuccagacucuucaauuucuuuucacucucuuuggauugagcaaaaaucucaucucuggaugcacgagcuucuucuaauucacguugguaauccuucaucugagccuggagcuugcggagcugcuuaaucaccucaucccgagcuuuguucgcagccucgauuugggcuucgagguccuucaggucuaucuccaucuuuuucuuugaagcuacagcaagcgcccgcuguuuccucucauccuccagcuccgccucgagcucccgcaccuguuugaucagcagccgcuucuucucuucauucugcucaucccugguuugcaggucucucucgaacugcgccuucauggccugcauguugaccuccagacgaagcuuggcaucuuccguggccuggaguucgucuuccagcuccuccagcuggguccucauuuccuccaccugcugcucuagggcccguuuggauuuuucaaguucgugaacguuuuuucccacaucaucuuuggagcucaugaggucuuccaugucugcucggagcugcuuguucugccucucaaacuccuccuuggccuccagggcuuccucgagggcccgggccagugacagggcuuugguuucuuucucucuggccucggcuucggcccggucccgcucuucggcauagcgagcagagaugcucuucucuucugcuaacagcuggucaaacuucuucugcuucuucuccaaguuggaggcgaccuggcgcuggugguccagguccaccgugaggucguccagcuccugcugcaggcgguucuuggucuucuccaguuugucauacgccagugccuucuccuccaggcgcuggcucagggccuccgcguccuucagaagcuucuucuuggcuucuuccagacuuucaauuguucccaggucgucaucuacuuucuucuugguaucagccaacugggacugcagggccagcacuugcuucuccagguucuuccuggccuccuccuccuccuccugcugcuccugaagacuguucuucuccucuuccagcugccggauccgacugcucagguuuaguuucuggcgugucuccuccugaagaagcuccuguguauccuguaguugagacucaagacuagcugcauccuuagcaaauuuaauacccuucuucucugcuucuuccagaaggguggagacauuaucuagcucauucugcagcuuacuugcuuucuccgccagcuccacccugagccugucgccuucagagaccuuggcauggagcuccuggaccugcgcgucgagcuucuuccucuugugcucagacucagccuugaccugcugcaggaccuucaccucacacgccagcuccuuguuaucugucuccaggcccugcuuguucuucucuagauuugcuuugaaccgcuuggccuguuccagcugcucugagagcuccuccagggcuguugcgugucuuugucucauguccuggauuugagcuucaugguucuuaguuuccuccucaagagcuuucuucagcucugccacuucuuguucacguuuuguacguaguuccugcugggcugccgugguguccagcguguccuccagcucuguuuucagagcuuccaguuccucacucaagucccuuuucugcuuuucggccuuguuccgugaagccuucucggauucaaagucuuccugaaguucagcaauuugggcuuguagcucucgcacaacuuuaagggcauuguucuuauggaguguuucaucaucaccucuggccagugcgcccugcagcuccuccuccuucuuggccagcugcagcuugagcucaucaaucugcgccugcagcucugcgaucugguccugcaggucggucgucuccccgucgaguuuucuuuuggccuuuuccaguuccugacgagucuuuucuuccuucuuuaagcguucuucuaaaucugagaucaucacuucuugcuuauuccugauuuuggccaaguuuuucgccuuuucuuccucuucagccagcugagaggaacacucagcaaugcgaucuuccaugaguuucuuuucuuugaugaacuuggaauuuugguccucgagaagcagaaucuccucuuccaucuucuugaucuuggccucugcugucaccuuuuccagcugcagcuuuugccgagccccuuccuccucgucuagcuguucuuccagguccugaauaugugcuugcauuuuuuucuuuucauuuuggaggauuugguuucuuucuucuucuucuucaacccuagacuccaagucauguagaaucucuucuaauuccugcuuuuuagcagcaagucuugcccucaucucuucugcuucagcaaagagcucagucucugcuuguaguuguucugcaaggauauucuucucuucuaaaagcugcuggugcuuccgcuccaucuccuccagcucuccuuccaccuucgucugcuucuccuucaccuucaacagcucuucaucuuuggccugaaguucuuccuccuggcgagucacuuguagaagcggcuucaccuuugugaagacucgccaccacugccagugccguaauuucagguacgcggcacaguuccgcugcaagaccuuuaaggcacuuaguugcugcugcuucuuggcaaaggccuuucuggccagguaaccucugcaaacggccuggaagaagauaaugauaucggugauuuuuaaaucucuuucuuccucuaagugugccagaacuccagcucugaaaaauaucuugcucuguccaauucuguacaaguuuggguccaauucuaaagcccggaucauucguucacaggccuguuuaccauccauaaaaccuuuaggaauagcauuuggaguuaggaucucauaucucugucugaauuccuggaaaacuauucgguuagggaagcccuggcgacagauucggaucccuuccaggacaccguuacagcgaagcugaucuaggacuagguguggauccaauuuuccagcccucuucucgugauuuggaaugauacaacgaacaaaguuaggguugguguuucggagaguugccaucagcuuggugagagauucuuuguagaguugcccaacgguacgaaacaugcccuucuugguuuuauaugcggagccaaaagcugucucagucauaccagugacuugauccagacccacgauacgguccacaucuuuccaaagcucugccacaaaucugucugaugacuggugcaaaaggguggccacguugucauucaggggguccauauucuucaucagccacucaucugccuuauaguccaccuucccugcauaauguauaaugcaaaaaucagcuuugucuuuuaauugucgagguuucugaaacuuggagugggaaccuugcucuugaaccaguuuuucaacaaagguuuuaucuguggcuuuagggaaccagcauucuucauccaaaagggccaguacaccaggaggguucgcaggucucucuauuaggucgaugcauggcugcagauccagcccgaaaucgaugaaguuccacucgaugccuucgcgcugguauuccucuuguucuaggauaaacauggugugguugaacagcugcugcagcuucucauugguguaguugaugcaaaguuguucaaaggaguucagcucaaaaauuucaaauccagcaauauccaggauuccaaugaaagaugcucccugacguuugguccuauccagagcuuuauugaugcgaugaacgagccagcgaaagagccgcucauagguagcuuuugccaaugcuucuacugcaaaaucugccuguucuuuggucugggcuuuuugcacauagucucggccgaccuugauccggggagucaggauggcccgaguaaacuccaucacauucaucccaagaagauggcagagcuucugcgcaacuguauuuucuggcauggaagcuugaucaguauuucucuccuuuuugaaagaaauauuuccaaacuguagcacugaagauacuacuuuaagcauugacagaaucucuucaugggagaagcccauuaugugcauugcuuccauggucuccuggaaauuaucuuugucuugcugucccggaauaggaauauagccauuggagagaaaccuguaguuauuaaauccuucaagaagcaaaucagacuuuagguguucuccugcuccagauaacaacugguaaaagauaugaaaaguacguucaucuuuugcuugacgaacagcacgagacuuuuccagaagguauguuucaauguuggccccaacgauauagccaguuacaucaaaguugauccgaauaaauuugccaaaacgagaugaguuaucauuuuucacagucuucgcauuuccaaaugauuccagaauuggauuugcuugcaaaagcugccguucaaguuccccaggaauauuaugguccuuucuuccuuuaugugaagaagcaacaugggcaagguacugaauaacuuucuuuguauuuucugucuucccagcaccugacucacccgugcaaagaauugacugguccucacgaucuugaagcaugcaucuguaagcagauucagauauagcauagauguguggaggcaucucaugacgcuucuucccucuguacauuucaauaauauucucagaguaaauuggaagauucuuguaaggguuuauaacuacacagaagaguccagaauaagucuccugaaacagugaggacaucucacagaccagacaggagcuggggcucugcaucucacagcggugccugucagacaggaagaagucccgcagaaguggcgugugggucagggccugcacgaugcaguucaugaagcauguguucccaagguugaucagcccacgcagaccuauggugcaguucgaggugaucuuucuccuuuucggguugugcuucagcaguucaagcucccguuugguugguucccaaguugaaaacuucucuccaacgccuugcauuuuccaagcuuuucgcugcuccuccuuggcgauuauuuccaugucuuugucauagauguaguccuggcacagaaaacaguagaugccuccguacaucagaucaauggccagguugugccgcuucgccuucgcaugcucgugaauaugcuucuuugugaaacagccgaagaagacacaguagaggcaggaaugcagccuguugagguggacgccacagacauggcagauacaggacuuggccuucggcuauugucauaggcucucaguauaguccgucugguacagagccgccucccgggacccuggcggcuagacguucccugucucuuccagaggacuggggaggcgggggcgugcugcgguugggcggcgcgagacgucaguccuagcacugaaccgguuugcgccggccugagcucugccgcaaagaggcggggcgaugagcuggagcgccgcaggucgggccuccauccagggccugcgcuuucccacccaaaagcacccccuaaucgggagcuguuugcagggcccccgguugccguaaccuggcucgggcccugcagugccguggcccggggcuggaacugccugccaacugccugguaggcgcugcccccggccgcaagcuggggcgccuccugucgggagcccgcugauagugagggccaacccggcgccau

SEQ ID NO: 2169 - RNA, 8164 nt, Homo sapiens
uucacaugauuauucuuguuuauugaggucucuuuauucuccacgggugcuuuuuucuucaaguaaacagagcaggcgcaaauaucuauaaugaauaaauuuauugucuuacaaaaaucauugucuagaaauaugggaauacaagaaaagauauuugcggucaggugucugguggucaacagccaguacaguucauaaagggggaaaauccaagauuccaaacccacaggacaaauucuuccuaauagauguuaaagcuuuuaacccaaaagguuuguguuuucaagcacauugcagaggaucaaggauuuagaauuaacacugauucauugucacugaaugucuguaauaccacuuugacuagagagguacaugauaugaagcacagucaaaacugaauacauuaaauuguuauagaggcgaaugauauauucaacauugucuuaguacuguagugucuaaggcacuuuccguaaugucaguuugcuuaacuaccaaccaaaaacaggaugcuaaguguucacuguaacacuguccaaagggaagggagaaggaaaaaugaaggagucacacccacuggcaugucaacauucaggaagauggcaucuguucuggaggcuccauaaaccucauugacaaacuuggaacaagccucggacacaaaaccaauauucccauuuugggcucaaagcagcggcugaauuugcaaggucagcaugagggcccggcuggcgauggggaggggccuuccaccagcucggcuuagggguccacggcugcuugcuccugacgugaggagggcgccggcagagccaggcgguucgggagaccaucuggaagucuacaugauccauggcugccaccuggggccucagcugcaguguggccacuaucccuucuaugcacagaccagcccucgccaaggccaguucacaugaguagaugcgggacaccaucgacucgaggggcagggccccccuugggggauggacaugguaaccccaaauggguguugcuuccgauccagcccaccccuccuacucuuuccaaagccccuuucacaguuugcucacugaaauagcauugaucauuauuugaaggaaaugagagagacaagugcaguuuagaguccacaguggucuaggagacuugauguggcugaggagucgggggccacgugaacacagaacuagguuaccugucuguaugacagagagcaugcagagcgacugagugacgaccacggcgcugccccaauaacccagcgacccgcaaccaagggccuggaguuuguuuuaaaaagggucuuaccauguuuuauaaaauggucucuugaugacuauauggaaaauagaugcaaugaugaaacaaucuguuuaauauauguguccugugugugucuauauauaaaaaggggagcaauuguaccuaagucugaagcaggauacaguaugcauaggcuggagagccuuaagacacaguugaucuuucaggaaggaaucccguagcuugccaauuuccgaaaucugcaggaggccccgggugcauuccuaacugucccacuguauugccuccucuggcuuccugcaacuuuacucugacugggguggcugcgucucguugacaucacuggucuuacuuucugugucaucgucggagagcuccagggaagcuccuucaaggugcagcuggcgccggccagaucggcuggaagagaagcugauggggccaccccgccucagccgguucuucagggugcugaccucgcggcucaggcccucguuggccucgguggcaucauccaguucccgcuggaguuuacgccgagaugcguuggcacgcgucgcuucuucuucugcuuccuccagcuggcguuuaagcugcuucauccgagcguuggccuucuccaucugcucuuuauacugguccgcgugucgacgcucauccucaaccugcaugaagauuucuuucagcuucuucucagugcgacggacuaauuuguuggcggcugcucguuccuuggcuuccugcucaagcugcuccuccagcugcccaaucuuggccuccagggcugagaugguggccuugaacuuagacuugacagcacccucgaguuccugcagcuuggccuucagcuccuuguucugccgcuccaguugcuggcgugcauugucacucuucugggcggcgcugcgcucggcugcuagcucggcguucaguguguccaccuguagaguggucuugcggaagcggucguugagcagcuccauguugcucugcuccucuuccagcuccuccuccagcugugcgauccgagcuuccagacgccgcuucucauccagcagcgcggacuugccagaggcgcuguuggugaucucguccgccagcucaucucucuccugcucggcgugucggcgggcucgcucagaugaggcaaguuccuccugcaauugaaggauuucugcuuccagacucuucaauuucuuuucacucucuuuggauugagcaaaaaucucaucucuggaugcacgagcuucuucuaauucacguugguaauccuucaucugagccuggagcuugcggagcugcuuaaucaccucaucccgagcuuuguucgcagccucgauuugggcuucgagguccuucaggucuaucuccaucuuuuucuuugaagcuacagcaagcgcccgcuguuuccucucauccuccagcuccgccucgagcucccgcaccuguuugaucagcagccgcuucuucucuucauucugcucaucccugguuugcaggucucucucgaacugcgccuucauggccugcauguugaccuccagacgaagcuuggcaucuuccguggccuggaguucgucuuccagcuccuccagcuggguccucauuuccuccaccugcugcucuagggcccguuuggauuuuucaaguucgugaacguuuuuucccacaucaucuuuggagcucaugaggucuuccaugucugcucggagcugcuuguucugccucucaaacuccuccuuggccuccagggcuuccucgagggcccgggccagugacagggcuuugguuucuuucucucuggccucggcuucggcccggucccgcucuucggcauagcgagcagagaugcucuucucuucugcuaacagcuggucaaacuucuucugcuucuucuccaaguuggaggcgaccuggcgcuggugguccagguccaccgugaggucguccagcuccugcugcaggcgguucuuggucuucuccaguuugucauacgccagugccuucuccuccaggcgcuggcucagggccuccgcguccuucagaagcuucuucuuggcuucuuccagacuuucaauuguucccaggucgucaucuacuuucuucuugguaucagccaacugggacugcagggccagcacuugcuucuccagguucuuccuggccuccuccuccuccuccugcugcuccugaagacuguucuucuccucuuccagcugccggauccgacugcucagguuuaguuucuggcgugucuccuccugaagaagcuccuguguauccuguaguugagacucaagacuagcugcauccuuagcaaauuuaauacccuucuucucugcuucuuccagaaggguggagacauuaucuagcucauucugcagcuuacuugcuuucuccgccagcuccacccugagccugucgccuucagagaccuuggcauggagcuccuggaccugcgcgucgagcuucuuccucuugugcucagacucagccuugaccugcugcaggaccuucaccucacacgccagcuccuuguuaucugucuccaggcccugcuuguucuucucuagauuugcuuugaaccgcuuggccuguuccagcugcucugagagcuccuccagggcuguugcgugucuuugucucauguccuggauuugagcuucaugguucuuaguuuccuccucaagagcuuucuucagcucugccacuucuuguucacguuuuguacguaguuccugcugggcugccgugguguccagcguguccuccagcucuguuuucagagcuuccaguuccucacucaagucccuuuucugcuuuucggccuuguuccgugaagccuucucggauucaaagucuuccugaaguucagcaauuugggcuuguagcucucgcacaacuuuaagggcauuguucuuauggaguguuucaucaucaccucuggccagugcgcccugcagcuccuccuccuucuuggccagcugcagcuugagcucaucaaucugcgccugcagcucugcgaucugguccugcaggucggucgucuccccgucgaguuuucuuuuggccuuuuccaguuccugacgagucuuuucuuccuucuuuaagcguucuucuaaaucugagaucaucacuucuugcuuauuccugauuuuggccaaguuuuucgccuuuucuuccucuucagccagcugagaggaacacucagcaaugcgaucuuccaugaguuucuuuucuuugaugaacuuggaauuuugguccucgagaagcagaaucuccucuuccaucuucuugaucuuggccucugcugucaccuuuuccagcugcagcuuuugccgagccccuuccuccucgucuagcuguucuuccagguccugaauaugugcuugcauuuuuuucuuuucauuuuggaggauuugguuucuuucuucuucuucuucaacccuagacuccaagucauguagaaucucuucuaauuccugcuuuuuagcagcaagucuugcccucaucucuucugcuucagcaaagagcucagucucugcuuguaguuguucugcaaggauauucuucucuucuaaaagcugcuggugcuuccgcuccaucuccuccagcucuccuuccaccuucgucugcuucuccuucaccuucaacagcucuucaucuuuggccugaaguucuuccuccuggcgagucacuuguagaagcggcuucaccuuugugaagacucgccaccacugccagugccguaauuucagguacgcggcacaguuccgcugcaagaccuuuaaggcacuuaguugcugcugcuucuuggcaaaggccuuucuggccagguaaccucugcaaacggccuggaagaagauaaugauaucggugauuuuuaaaucucuuucuuccucuaagugugccagaacuccagcucugaaaaauaucuugcucuguccaauucuguacaaguuuggguccaauucuaaagcccggaucauucguucacaggccuguuuaccauccauaaaaccuuuaggaauagcauuuggaguuaggaucucauaucucugucugaauuccuggaaaacuauucgguuagggaagcccuggcgacagauucggaucccuuccaggacaccguuacagcgaagcugaucuaggacuagguguggauccaauuuuccagcccucuucucgugauuuggaaugauacaacgaacaaaguuaggguugguguuucggagaguugccaucagcuuggugagagauucuuuguagaguugcccaacgguacgaaacaugcccuucuugguuuuauaugcggagccaaaagcugucucagucauaccagugacuugauccagacccacgauacgguccacaucuuuccaaagcucugccacaaaucugucugaugacuggugcaaaaggguggccacguugucauucaggggguccauauucuucaucagccacucaucugccuuauaguccaccuucccugcauaauguauaaugcaaaaaucagcuuugucuuuuaauugucgagguuucugaaacuuggagugggaaccuugcucuugaaccaguuuuucaacaaagguuuuaucuguggcuuuagggaaccagcauucuucauccaaaagggccaguacaccaggaggguucgcaggucucucuauuaggucgaugcauggcugcagauccagcccgaaaucgaugaaguuccacucgaugccuucgcgcugguauuccucuuguucuaggauaaacauggugugguugaacagcugcugcagcuucucauugguguaguugaugcaaaguuguucaaaggaguucagcucaaaaauuucaaauccagcaauauccaggauuccaaugaaagaugcucccugacguuugguccuauccagagcuuuauugaugcgaugaacgagccagcgaaagagccgcucauagguagcuuuugccaaugcuucuacugcaaaaucugccuguucuuuggucugggcuuuuugcacauagucucggccgaccuugauccggggagucaggauggcccgaguaaacuccaucacauucaucccaagaagauggcagagcuucugcgcaacuguauuuucuggcauggaagcuugaucaguauuucucuccuuuuugaaagaaauauuuccaaacuguagcacugaagauacuacuuuaagcauugacagaaucucuucaugggagaagcccauuaugugcauugcuuccauggucuccuggaaauuaucuuugucuugcugucccggaauaggaauauagccauuggagagaaaccuguaguuauuaaauccuucaagaagcaaaucagacuuuagguguucuccugcuccagauaacaacugguaaaagauaugaaaaguacguucaucuuuugcuugacgaacagcacgagacuuuuccagaagguauguuucaauguuggccccaacgauauagccaguuacaucaaaguugauccgaauaaauuugccaaaacgagaugaguuaucauuuuucacagucuucgcauuuccaaaugauuccagaauuggauuugcuugcaaaagcugccguucaaguucccccugguguuucacugguuuaggcgauucaggaauauuaugguccuuucuuccuuuaugugaagaagcaacaugggcaagguacugaauaacuuucuuuguauuuucugucuucccagcaccugacucacccgugcaaagaauugacugguccucacgaucuugaagcaugcaucuguaagcagauucagauauagcauagauguguggaggcaucucaugacgcuucuucccucuguacauuucaauaauauucucagaguaaauuggaagauucuuguaaggguuuauaacuacacagaagaguccagaauaagucuccugaaacagugaggacaucucacagaccagacaggagcuggggcucugcaucucacagcggugccugucagacaggaagaagucccgcagaaguggcgugugggucagggccugcacgaugcaguucaugaagcauguguucccaagguugaucagcccacgcagaccuauggugcaguucgaggugaucuuucuccuuuucggguugugcuucagcaguucaagcucccguuugguugguucccaaguugaaaacuucucuccaacgccuugcauuuuccaagcuuuucgcugcuccuccuuggcgauuauuuccaugucuuugucauagauguaguccuggcacagaaaacaguagaugccuccguacaucagaucaauggccagguugugccgcuucgccuucgcaugcucgugaauaugcuucuuugugaaacagccgaagaagacacaguagaggcaggaaugcagccuguugagguggacgccacagacauggcagauacaggacuuggccuucggcuauugucauaggcucucaguauaguccgucugguacagagccgccucccgggacccuggcggcuagacguucccugucucuuccagaggacuggggaggcgggggcgugcugcgguugggcggcgcgagacgucaguccuagcacugaaccgguuugcgccggccugagcucugccgcaaagaggcggggcgaugagcuggagcgccgcaggucgggccuccauccagggccugcgcuuucccacccaaaagcacccccuaaucgggagcuguuugcagggcccccgguugccguaaccuggcucgggcccugcagugccguggcccggggcuggaacugccugccaacugccugguaggcgcugcccccggccgcaagcuggggcgccuccugucgggagcccgcugauagugagggccaacccggcgccau

SEQ ID NO: 2170-2182 - skipped (13 entries)

SEQ ID NO: 2183 - RNA, 2247 nt, Homo sapiens
uugauauauuuauuugauuuauuuacauaaccaguagaaaggagauuuuaaaaauauuuauuacauuuguuucuagaaaucauagaaaauaaaaauugauacaauuuugauauacaacuuuagaaaggcauauuuauccuuucacaccagagaaguuuaugcaaugccagacauggaaauaccaaagccacuggugacaaaggguaaacgcuacugauagaagaaagccuuguccauuuuuauaguuuucuucucuaccauuauuuauuuuugagcaaauaccaguccaguggaaagaguucugaacauaaaaggcaccuagaguaaaaauuagaccuuaacuaauaaaacagcuguacacguuuacaucaagaaaaaaaaacccggccagcacagcucaugccuguaaucccaggaguuagccucggcaacauggccaaacccccgucucuacaaaaaaauacaaaaaucagcuaggcgugguggugcgcgccuguacucccagcuacuuaggaggcugaggugggagagucacuggagccugggaggucgaggcugcagugcaagauugagaauugcaggauugcacugcaauccagccugugcuacagagugagauccugucucgaaaaaaaaaauaaaaaaauaaaaugggccuaucaaugcaacguuccugcaaggcauugauaauauaaaugcaaaagccaccgcaaccaaaaagucuauaaugcuugccugaaucuaguacauaagcaggauaaugacaaucacuuuuuguuuauaaauuuguagaugucuuauuauuucagucagcaugaguacuguauuuauauuuguggguggcagcucucaaauuauuuauccauaguccagauuuguuuuguugcauuugcucuuaaaaugcauuguuguauacuccaucacagaugugucaaauacuccugcugucuuuugagaauguagcaaaaccuaaaccugcuacuuuaaaccaaaguccuuuuuuuauuauuguaaagcugacauuuuacucugauuuaagcaccugaaguguauuuugacuaauuuauauucugagcuaaaauuaagaaccucaggauuuguguacauguacaaauauugcaaauuauuucuuuaagcuaauaaaaacuuaaaaauacaaauaauuuuuauuacaaagauuugaaauccauauaugagucugaacuaagacaaaaaugcacagggagccaggaagcaaacacuuguguacguuuucuaaucuguggacaagguacugcucagcgaagccagguuguauucagcugcgucugguucuugauacugguauccauuuuuagcacuucucgaauggccaugguggcguaaguagaaggggguagagaaaaauccauuuucagagcccuguauuugccuucagaagcaaaaacugguggugucuucccuucuagguuguccacaucuguguugaaaaguggaauuuugggaucaucauaugcaacgacuucccagcuaacauucugaggacgaauaaugaucuuucgguaggccccugacaaggaauaaucucgaauuuugugucucauguugucaauaucaagauugucagcugugagcauuucccuguaggcuucuugaauuuuaugcuuuggguagauaacaucgaaaccaggcaagggcauuaccacaucauggauagaguaauuauuaacaucaucuuccucaauauagguggcuguggcuccuuugagaacgagguccccuggaacagguuuuaguccauagucuucuauccucuugcuuaccauguuauuccacacauagcuuugguagcuaugaauauacauuaagcgauuauuucuggguauuaugccaaaugcagagacuauauucuucauuccauauuuugaaaguccucgaagcagcugcccuuccacacaccuuuugacagguaguuuucugagggcagcaguugggucuuuggucuuugcccauucuucucugcauuuaaccaaguagcccuuuucagcuccagagcgggguuucaauauuaaauccaugacuucuguccaggaauuuuguaguauagcuuuuuucggauguuucucucuuuucggccuccgcuuucgggccugaauggccagcacuuuccgggagcucauuccgacgcggcggaagcggggcggggggcuucgcgacggcgacgcgggcgccgagacgagcugggcugcagccuccacucgcuccgcc

SEQ ID NO: 2184 - RNA, 1665 nt, Homo sapiens
uugauauauuuauuugauuuauuuacauaaccaguagaaaggagauuuuaaaaauauuuauuacauuuguuucuagaaaucauagaaaauaaaaauugauacaauuuugauauacaacuuuagaaaggcauauuuauccuuucacaccagagaaguuuaugcaaugccagacauggaaauaccaaagccacuggugacaaaggguaaacgcuacugauagaagaaagccuuguccauuuuuauaguuuucuucucuaccauuauuuauuuuugagcaaauaccaguccaguggaaagaguucugaacauaaaaggcaccuagaguaaaaauuagaccuuaacuaauaaaacagcuguacacguuuacaucaagaaaaaaaaacccggccagcacagcucaugccuguaaucccaggaguuagccucggcaacauggccaaacccccgucucuacaaaaaaauacaaaaaucagcuaggcgugguggugcgcgccuguacucccagcuacuuaggaggcugaggugggagagucacuggagccugggaggucgaggcugcagugcaagauugagaauugcaggauugcacugcaauccagccugugcuacagagugagauccugucucgaaaaaaaaaauaaaaaaauaaaaugggccuaucaaugcaacguuccugcaaggcauugauaauauaaaugcaaaagccaccgcaaccaaaaagucuauaaugcuugccugaaucuaguacauaagcaggauaaugacaaucacuuuuuguuuauaaauuuguagaugucuuauuauuucagucagcaugaguacuguauuuauauuuguggguggcagcucucaaauuauuuauccauaguccagauuuguuuuguugcauuugcucuuaaaaugcauuguuguauacuccaucacagaugugucaaauacuccugcugucuuuugagaauguagcaaaaccuaaaccugcuacuuuaaaccaaaguccuuuuuuuauuauuguaaagcugacauuuuacucugauuuaagcaccugaaguguauuuugacuaauuuauauucugagcuaaaauuaagaaccucaggauuuguguacauguacaaauauugcaaauuauuucuuuaagcuaauaaaaacuuaaaaauacaaauaauuuuuauuacaaagauuugaaauccauauaugagucugaacuaagacaaaaaugcacagggagccaggaagcaaacacuuguguacguuuucuaaucuguggacaagguacugcucagcgaagccagguuguauucagcugcgucugguucuugauacugguauccauuuuuagcacuucucgaauggccaugguggcguaaguagaaggggguagagaaaaauccauuuucagagcccuguauuugccuucagaagcaaaaacugguggugucuucccuucuagguuguccacaucuguguugaaaaguggaauuuugggaucaucauaugcaacgacuuccuuuuucggauguuucucucuuuucggccuccgcuuucgggccugaauggccagcacuuuccgggagcucauuccgacgcggcggaagcggggcggggggcuucgcgacggcgacgcgggcgccgagacgagcugggcugcagccuccacucgcuccgcc

SEQ ID NO: 2185-2187 - skipped (3 entries)

SEQ ID NO: 2188 - RNA, 4328 nt, Homo sapiens
uugugucccaaucauuuuuuauuccuuuucccaaaaugacaugugaagguugcucucccccaagaaacuuuccccgaagaacccuuucuauucuuuaaaacaaucagacacauuuaccuacugaugcccuaguaguuacacaucaucacguggcuucuugguuauugaaggaguuugaccucucugccaggcugcgacaugcacagccuaggaggcaccucagugcuucgcauuguccuggauacaaaacaguugcuuaauagguauguguuggauuggacugaauggcaaccagccagcuccaaaauuccagccaccaccuggugaccagcauuuuuucugccuuugaaauaguggguuuggugacuugaggauaugcucgugguggcaggcaguuugggcucugguuggucguggcuugggcagcccugcuggaggcaggccacaaaaaguggcagcucccacaccugggcugcacaagagauggaaggugagugcuucacgcaggcaaacccaggaauaaaauagcuuuggacuuuauuuaaauguauccauuccaggagcauaggccuggaagaagcccaggccccaagaaguugugacuguccccugggcuuccuauggcaccaggcauugaagcauguccugguggccgggaguggcuggggcagagggcggugaagagaguggcuauagggaguuuagggugaggacccacccccgggccuagagggccacagugcgcaggcucauuggaggaucuucccuccggccaccucuccugcaccuccagaccacugucccgaugaugcccaccacaaggccgacucccgcugccacugggacagcccaguagagcaccucgggggcuucuucagccuggucugggagcaaucggcuguuccgcaggguguagagguaagggcucucaggagaggggcacuugaguuuggcucggcugugggugaaguuguuggagguagucuugcggcccacugguuccagcauguuguuccagagugcgauggccaucucggcaugcccgcggucugagaagugaaaacaguccucggagaagaaggugaggucaguguccccucucucguucaguggggugaguguguuuuggaagaaaggcugcaccacaaccgcaaaguccucacgcuguguguauuggugccaguaggagaaacuggagaugccaugcuggagguuccaguucacuuucuucaguucuugcuucuccagggagcuuugcgagugucugaggcaagugcaguuguucugagcugccagcauggcacauuucccgccuuggcccugguacaggcuagccagcuccaugaccuccaccacguugacgaaagcccuugggagcuccucagagaggauguccagggccuguuggaugugcugaacauauuccguggccaagugggccuccggauucucacaguaaugacacaagucguugaccccaaugaagagugugaccagcuuccagucuuucuccagguugaugucggggcuguuuuucauucgcucuaccaggucccaggccugggcuggcaugucccuagcucuggccccuuccgcugccacauuuaguccugcuguccccucccaggugcugguagagaagccaaggagguaaggguugaacuucuucagaauguugggcaguguggugugagucuccaaguucccauccccuccaaugcuccaagagaguccccuccaagauguggguaggucacuggaguuguuuggucgagcucccacugcuguagucagagagucacccagggcggccaccacuuugaugucugcuggucggagcugguggacagagguuggaacacuauuggaagccuuccacucuguacacaggaagucacugccccaguucucaauggcuggcuugaugggguacguguaguuacuauuccgagggguucucaggaagggcucauucugagugggacaggugaugggcaucucugcucucagguccagggucucuguuuugcuuccaagugguucaagcauauugguccaaagggcucuggccagcugggaguggaauuucugauuuggguggaugcagucuggggcaaagaaggacguaucugggagcccauccgccaggacagggagcuggauguucuggaagaagggcugcagcaccacagagaaguccuccugcgugucauagcggccugaccccaccagcucgcgcaugcugcuccgguaggcucggcugaaggccuccagccuggcuagcucuugggaguucucccgcagggucagaacgcaguuacacaaaacgcuggccugcugcacugggcacuugucuggguuucccaggaacaccugccgcaugauagugggguucaggaaguccacgagguugaccaggacucugggcaccucucuaugcaggacguccaaggcauugcggagauggugaacaaaguuggcugcagaauacagauucgaaucugugcaguagucacauaaaucgcugccuccgaucagcacugugaugaccuuccagucuucauggaaauuuacucuaugaucaucuuucaucuucugcaucagaguuuggacuuggcucauaagauccucagccuuugcuccgggaacagcuugauugaggaaugcauucgugucauuggcaucacccgugcccacggcguagccugugagguuucuguuaaacucccgaaggauauuagguaagguggucacauucuccagggagccguccccuccugcacuguaugacaguccccgauacuguguggugacaucggggaggucgucugguuuggagccaauuccauugccagcggucagagaaucccccagagcagccacaacuuggaugucugcaggucucagggcaugcacugagguagggugcaaggcagaaggggcucugucccugcauggcagccaggucccaugacccugcaugcuguucuuguagguccucagaaacggcuggaccugguucggacaugugauauugaucuuguuuucaaacuuaugacgagucgucuucuggccaacaggcuccagcauauuguuccagagagcacuggcugcucgggagugagacuugcugcugaaguggaaacagucaggagcgaagaaagaguugucaggcaauccuuccgaggucuuuggcauguccacguuuucaaagaacggcugcacaaccacaguaaaaucuucccuugugucauaucgcccacucucaaucaguuggugggucuucuccugaaacuucuuguugaauucgaugaggguagcaaguucuguugaguuaucaucaaacuucaggacacagggacacagagaccugaggaucauccuugggcaguagacuuuuuucuccugguacagcucccucagguugacgaucucaagcaccgucaccagguucacaaaugcccgaggaaccucagcauggaggauguccagggccuuuccaauguugucugugaaguucuggggagaauaguggaccagaucauugcagaaaucacagaggucauugccgccuauaaacaggguuauuaucuuccagucuuccugaaaguguauccucgugucauucuucaucagguccaccagccuccuggccuggacagguagauccucagcucggccuccugccacagccugguuuaagaaggcauuaggacugguuucuuucccagugccaacagagaagcccuucagggaaggguugaauucccggaggaugucacaaauuuucagcggugcuuccaauuccaaaagaauaggcuggcugagaaagaucucccgagacuugauacauaagccucgaacuucugcuucagucaucugcacaaucuuuccuggacgacauccucguaccuccagcagccgggugaugaggcuguccacguucagcuccccguccgccaucuugucggcacagacucuccuucccagcagcgggaacaagggcuucucggcggcggaggcugcggcgacggcucggcguucucucaccuacaagucacgcggcguuucgaccccggcuccaacucccccuuuucccgggcccuccccccacccccuccccgccggguagcgagagcgcgcgcacacucggaggcacccacggaaaauaaauaaauaaacaagagaggcccccucgaacagggccgcgucagacccaggccgccaccuccuccuccucggcaccgcccagcuccgcaaagcucaccagcgccgccgacggccccacccgcagcgccacucacuccgcacgucccuugcgcgccgcc

SEQ ID NO: 2189 - RNA, 3634 nt, Homo sapiens
uugguaaguaaauuuuauuuugauccuuugaauggucccaaacaagcgaacuuauuucaauggaagaaaaggcaaugcucucaagaccuuggggcccagcacauuguuaagcuggccaaagcuggaaccguucacuacagaaucucacaggucaaggggccuuggaaauauucacagccgagccucuucugcagguccuguucacagccacccaccccccaugaauucugggucuacuucuccccuaauuccaugagauccacucuuuucacuuuguuucccagggggaagaggcucaaauugcauucugaauugaucuaguaucauuaauugccuaguuuguccaaucuagaagcuuuaacggcucaaaaauugcuuuucucagauaagucuacuacgugaacacuuucaggagguguuaacagguguuaugaacaaagaaaauguucuggaauuaagggaaacauuggguuaaacagauaaaacuuaaauagauuucugcauugcaggccuuaugagagccuuuaauaugcuaauacacacaugaauuccccaaaggaagguuaugguaauguuucccccucagauacaaaggauuuucucuucuccaggaacaggucuggaguuaauguuccauggaacacacuuugagacacaguagucuauguauucuaccaagugucaagcugucucucagaccccgaccuagagcuuccaucuuuaacacacgugcauuugggggcagcuauuugaaacauuuaggacaaaugaaggguuuaaagggacagcagccauugaaccugaggccuuagagcuagaacuaaaagauugagacauuaggcuguaauggacuucacuuguuggaagaaacagagcaauggcugaauuuucccaucgcugcagaaagaaacuuuuaguagaggacugcugguucauaucugaaucccaggagcccagcuggucgaucuguuuuaaaguagggcacaucaccucacuuccccaggcugccccaccaggugcacgucgcguaucuaucaccugcaaugugguucgucugcuugauuuuuguuucccaugcuaucguaugaggucauugccuucuuuagcugagaccaagugcagcugccagaaccucaugcucuuuccugauuguaauaagcucugcuuucucuccucugguuuuuuuucuuguagccucauuaggagcagaauggugagucagugaggcucugauuuguuccauggcagccuguuaggaccagguaccugaccaaggacuuguggaaacgcagggaccuuggcgcaggaaggcacugaccucuguucuugagagguugauguccucaugcuaaggacaaccuagguccucguugugggugguacaggccgagugauggcgccucccucucgcccuggaaacccauccucucugggacucugcucaggucuggccagagaaccuucacagucuugaucacccccucccugcucccugucacuuccccaggaagcaaacugacucagaagaaaagggaggcggcagcaaaggugcuguccuggcuccgccacucauuagcacgcugcccccuuguggccagcuucguucuaguuguuuucccagguaaauucugagcuacucgccacuuacuuugaagccuacaggaaugagaacuuuauuaggagagaaagaaacuugagaauaucuacacgcaaccgcucgccugacacacccugagcuucuccacuuccguguucgggaugcccuuucucacccuuuccucuugucgaauugcuaaucuuucaagacauggcugauugugauugugucuugguuauggccucucgaagugugcgauggguuucagagguuuucugugcagauguguacauauauguaaaggcagcugugugacuacaagacaacaugaauaaacacauaaagacaguaaacagagacguaggaacaccacguguacacguauacaugcaagcggggaggugaagauucagggauuuggugcuuuucuggugcauuuccuguuggauuugcugacccaggagucugauaagaacccugguuuacuuucucuguaugacaguccccgauacuguguggugacaucggggaggucgucugguuuggagccaauuccauugccagcggucagagaaucccccagagcagccacaacuuggaugucugcaggucucagggcaugcacugagguagggugcaaggcagaaggggcucugucccugcauggcagccaggucccaugacccugcaugcuguucuuguagguccucagaaacggcuggaccugguucggacaugugauauugaucuuguuuucaaacuuaugacgagucgucuucuggccaacaggcuccagcauauuguuccagagagcacuggcugcucgggagugagacuugcugcugaaguggaaacagucaggagcgaagaaagaguugucaggcaauccuuccgaggucuuuggcauguccacguuuucaaagaacggcugcacaaccacaguaaaaucuucccuugugucauaucgcccacucucaaucaguuggugggucuucuccugaaacuucuuguugaauucgaugaggguagcaaguucuguugaguuaucaucaaacuucaggacacagggacacagagaccugaggaucauccuugggcaguagacuuuuuucuccugguacagcucccucagguugacgaucucaagcaccgucaccagguucacaaaugcccgaggaaccucagcauggaggauguccagggccuuuccaauguugucugugaaguucuggggagaauaguggaccagaucauugcagaaaucacagaggucauugccgccuauaaacaggguuauuaucuuccagucuuccugaaaguguauccucgugucauucuucaucagguccaccagccuccuggccuggacagguagauccucagcucggccuccugccacagccugguuuaagaaggcauuaggacugguuucuuucccagugccaacagagaagcccuucagggaaggguugaauucccggaggaugucacaaauuuucagcggugcuuccaauuccaaaagaauaggcuggcugagaaagaucucccgagacuugauacauaagccucgaacuucugcuucagucaucugcacaaucuuuccuggacgacauccucguaccuccagcagccgggugaugaggcuguccacguucagcuccccguccgccaucuugucggcacagacucuccuucccagcagcgggaacaagggcuucucggcggcggaggcugcggcgacggcucggcguucucucaccuacaagucacgcggcguuucgaccccggcuccaacucccccuuuucccgggcccuccccccacccccuccccgccggguagcgagagcgcgcgcacacucggaggcacccacggaaaauaaauaaauaaacaagagaggcccccucgaacagggccgcgucagacccaggccgccaccuccuccuccucggcaccgcccagcuccgcaaagcucaccagcgccgccgacggccccacccgcagcgccacucacuccgcacgucccuugcgcgccgcc

SEQ ID NO: 2190 - RNA, 3918 nt, Homo sapiens
uugugucccaaucauuuuuuauuccuuuucccaaaaugacaugugaagguugcucucccccaagaaacuuuccccgaagaacccuuucuauucuuuaaaacaaucagacacauuuaccuacugaugcccuaguaguuacacaucaucacguggcuucuugguuauugaaggaguuugaccucucugccaggcugcgacaugcacagccuaggaggcaccucagugcuucgcauuguccuggauacaaaacaguugcuuaauagguauguguuggauuggacugaauggcaaccagccagcuccaaaauuccagccaccaccuggugaccagcauuuuuucugccuuugaaauaguggguuuggugacuugaggauaugcucgugguggcaggcaguuugggcucugguuggucguggcuugggcagcccugcuggaggcaggccacaaaaaguggcagcucccacaccugggcugcacaagagauggaaggugagugcuucacgcaggcaaacccaggaauaaaauagcuuuggacuuuauuuaaauguauccauuccaggagcauaggccuggaagaagcccaggccccaagaaguugugacuguccccugggcuuccuauggcaccaggcauugaagcauguccugguggccgggaguggcuggggcagagggcggugaagagaguggcuauagggaguuuagggugaggacccacccccgggccuagagggccacagugcgcaggcucauuggaggaucuucccuccggccaccucuccugcaccuccagaccacugucccgaugaugcccaccacaaggccgacucccgcugccacugggacagcccaguagagcaccucgggggcuucuucagccuggucugggagcaaucggcuguuccgcaggguguagagguaagggcucucaggagaggggcacuugaguuuggcucggcugugggugaaguuguuggagguagucuugcggcccacugguuccagcauguuguuccagagugcgauggccaucucggcaugcccgcggucugagaagugaaaacaguccucggagaagaaggugaggucaguguccccucucucguucaguggggugaguguguuuuggaagaaaggcugcaccacaaccgcaaaguccucacgcuguguguauuggugccaguaggagaaacuggagaugccaugcuggagguuccaguucacuuucuucaguucuugcuucuccagggagcuuugcgagugucugaggcaagugcaguuguucugagcugccagcauggcacauuucccgccuuggcccugguacaggcuagccagcuccaugaccuccaccacguugacgaaagcccuugggagcuccucagagaggauguccagggccuguuggaugugcugaacauauuccguggccaagugggccuccggauucucacaguaaugacacaagucguugaccccaaugaagagugugaccagcuuccagucuuucuccagguugaugucggggcuguuuuucauucgcucuaccaggucccaggccugggcuggcaugucccuagcucuggccccuuccgcugccacauuuaguccugcuguccccucccaggugcugguagagaagccaaggagguaaggguugaacuucuucagaauguugggcaguguggugugagucuccaaguucccauccccuccaaugcuccaagagaguccccuccaagauguggguaggucacuggaguuguuuggucgagcucccacugcuguagucagagagucacccagggcggccaccacuuugaugucugcuggucggagcugguggacagagguuggaacacuauuggaagccuuccacucuguacacaggaagucacugccccaguucucaauggcuggcuugaugggguacguguaguuacuauuccgagggguucucaggaagggcucauucugagugggacaggugaugggcaucucugcucucagguccagggucucuguuuugcuuccaagugguucaagcauauugguccaaagggcucuggccagcugggaguggaauuucugauuuggguggaugcagucuggggcaaagaaggacguaucugggagcccauccgccaggacagggagcuggauguucuggaagaagggcugcagcaccacagagaaguccuccugcgugucauagcggccugaccccaccagcucgcgcaugcugcuccgguaggcucggcugaaggccuccagccuggcuagcucuugggaguucucccgcagggucagaacgcaguuacacaaaacgcuggccugcugcacugggcacuugucuggguuucccaggaacaccugccgcaugauagugggguucaggaaguccacgagguugaccaggacucugggcaccucucuaugcaggacguccaaggcauugcggagauggugaacaaaguuggcugcagaauacagauucgaaucugugcaguagucacauaaaucgcugccuccgaucagcacugugaugaccuuccagucuucauggaaauuuacucuaugaucaucuuucaucuucugcaucagaguuuggacuuggcucauaagauccucagccuuugcuccgggaacagcuugauugaggaaugcauucgugucauuggcaucacccgugcccacggcguagccugugagguuucuguuaaacucccgaaggauauuagguaagguggucacauucuccagggagccguccccuccugcacuguaugacaguccccgauacuguguggugacaucggggaggucgucugguuuggagccaauuccauugccagcggucagagaaucccccagagcagccacaacuuggaugucugcaggucucagggcaugcacugagguagggugcaaggcagaaggggcucugucccugcauggcagccaggucccaugacccugcaugcuguucuuguagguccucagaaacggcuggaccugguucggacaugugauauugaucuuguuuucaaacuuaugacgagucgucuucuggccaacaggcuccagcauauuguuccagagagcacuggcugcucgggagugagacuugcugcugaaguggaaacagucaggagcgaagaaagaguugucaggcaauccuuccgaggucuuuggcauguccacguuuucaaagaacggcugcacaaccacaguaaaaucuucccuugugucauaucgcccacucucaaucaguuggugggucuucuccugaaacuucuuguugaauucgaugaggguagcaaguucuguugaguuaucaucaaacuucaggacacagggacacagagaccugaggaucauccuugggcaguagacuuuuuucuccugguacagcucccucagguugacgaucucaagcaccgucaccagguucacaaaugcccgaggaaccagaucauugcagaaaucacagaggucauugccgccuauaaacaggguuauuaucuuccagucuuccugaaaguguauccucgugucauucuucaucagguccaccagccuccuggccuggacagguagauccucagcucggccuccugccacagccugguuuaagaaggcauuaggacugguuucuuucccagugccaacagagaagcccuucagggaaggguugaauucccggaggaugucacaaauuuucagcggugcuuccaauuccaaaagaauaggcuggcugagaaagaucucccgagacuugauacauaagccucgaacuucugcuucagucaucugcacaaucuuuccuggacgacauccucguacagcgccgccgacggccccacccgcagcgccacucacuccgcacgucccuugcgcgccgccgcgucacgcagc

SEQ ID NO: 2191 - RNA, 3679 nt, Homo sapiens
uugguaaguaaauuuuauuuugauccuuugaauggucccaaacaagcgaacuuauuucaauggaagaaaaggcaaugcucucaagaccuuggggcccagcacauuguuaagcuggccaaagcuggaaccguucacuacagaaucucacaggucaaggggccuuggaaauauucacagccgagccucuucugcagguccuguucacagccacccaccccccaugaauucugggucuacuucuccccuaauuccaugagauccacucuuuucacuuuguuucccagggggaagaggcucaaauugcauucugaauugaucuaguaucauuaauugccuaguuuguccaaucuagaagcuuuaacggcucaaaaauugcuuuucucagauaagucuacuacgugaacacuuucaggagguguuaacagguguuaugaacaaagaaaauguucuggaauuaagggaaacauuggguuaaacagauaaaacuuaaauagauuucugcauugcaggccuuaugagagccuuuaauaugcuaauacacacaugaauuccccaaaggaagguuaugguaauguuucccccucagauacaaaggauuuucucuucuccaggaacaggucuggaguuaauguuccauggaacacacuuugagacacaguagucuauguauucuaccaagugucaagcugucucucagaccccgaccuagagcuuccaucuuuaacacacgugcauuugggggcagcuauuugaaacauuuaggacaaaugaaggguuuaaagggacagcagccauugaaccugaggccuuagagcuagaacuaaaagauugagacauuaggcuguaauggacuucacuuguuggaagaaacagagcaauggcugaauuuucccaucgcugcagaaagaaacuuuuaguagaggacugcugguucauaucugaaucccaggagcccagcuggucgaucuguuuuaaaguagggcacaucaccucacuuccccaggcugccccaccaggugcacgucgcguaucuaucaccugcaaugugguucgucugcuugauuuuuguuucccaugcuaucguaugaggucauugccuucuuuagcugagaccaagugcagcugccagaaccucaugcucuuuccugauuguaauaagcucugcuuucucuccucugguuuuuuuucuuguagccucauuaggagcagaauggugagucagugaggcucugauuuguuccauggcagccuguuaggaccagguaccugaccaaggacuuguggaaacgcagggaccuuggcgcaggaaggcacugaccucuguucuugagagguugauguccucaugcuaaggacaaccuagguccucguugugggugguacaggccgagugauggcgccucccucucgcccuggaaacccauccucucugggacucugcucaggucuggccagagaaccuucacagucuugaucacccccucccugcucccugucacuuccccaggaagcaaacugacucagaagaaaagggaggcggcagcaaaggugcuguccuggcuccgccacucauuagcacgcugcccccuuguggccagcuucguucuaguuguuuucccagguaaauucugagcuacucgccacuuacuuugaagccuacaggaaugagaacuuuauuaggagagaaagaaacuugagaauaucuacacgcaaccgcucgccugacacacccugagcuucuccacuuccguguucgggaugcccuuucucacccuuuccucuugucgaauugcuaaucuuucaagacauggcugauugugauugugucuugguuauggccucucgaagugugcgauggguuucagagguuuucugugcagauguguacauauauguaaaggcagcugugugacuacaagacaacaugaauaaacacauaaagacaguaaacagagacguaggaacaccacguguacacguauacaugcaagcggggaggugaagauucagggauuuggugcuuuucuggugcauuuccuguuggauuugcugacccaggagucugauaagaacccugguuuacuuucucuguaugacaguccccgauacuguguggugacaucggggaggucgucugguuuggagccaauuccauugccagcggucagagaaucccccagagcagccacaacuuggaugucugcaggucucagggcaugcacugagguagggugcaaggcagaaggggcucugucccugcauggcagccaggucccaugacccugcaugcuguucuuguagguccucagaaacggcuggaccugguucggacaugugauauugaucuuguuuucaaacuuaugacgagucgucuucuggccaacaggcuccagcauauuguuccagagagcacuggcugcucgggagugagacuugcugcugaaguggaaacagucaggagcgaagaaagaguugucaggcaauccuuccgaggucuuuggcauguccacguuuucaaagaacggcugcacaaccacaguaaaaucuucccuugugucauaucgcccacucucaaucaguuggugggucuucuccugaaacuucuuguugaauucgaugaggguagcaaguucuguugaguuaucaucaaacuucaggacacagggacacagagaccugaggaucauccuugggcaguagacuuuuuucuccugguacagcucccucagguugacgaucucaagcaccgucaccagguucacaaaugcccgaggaaccucagcauggaggauguccagggccuuuccaauguugucugugaaguucuggggagaauaguggaccagaucauugcagaaaucacagaggucauugccgccuauaaacaggguuauuaucuuccagucuuccugaaaguguauccucgugucauucuucaucagguccaccagccuccuggccuggacagguagauccucagcucggccuccugccacagccugguuuaagaaggcauuaggacugguuucuuucccagugccaacagagaagcccuucagggaaggguugaauucccggaggauguucgccagggugguaacggugccgauguucucaucuccgccgacgcuccaggacaggccucgguacugagucaagacguccaagacguucccagguguggacccggccccauugccugccgugagagagucacccagggcuccaauuacguugaugucagccggcuucagccuaugaaccuccagcagccgggugaugaggcuguccacguucagcuccccguccgccaucuugucggcacagacucuccuucccagcagcgggaacaagggcuucucggcggcggaggcugcggcgacggcucggcguucucucaccuacaagucacgcggcguuucgaccccggcuccaacucccccuuuucccgggcccuccccccacccccuccccgccggguagcgagagcgcgcgcacacucggaggcacccacggaaaauaaauaaauaaacaagagaggcccccucgaacagggccgcgucagacccaggccgccaccuccuccuccucggcaccgcccagcuccgcaaagcucaccagcgccgccgacggccccacccgcagcgccacucacuccgcacgucccuugcgcgccgcc

SEQ ID NO: 2192 - RNA, 5432 nt, Homo sapiens
uugugucccaaucauuuuuuauuccuuuucccaaaaugacaugugaagguugcucucccccaagaaacuuuccccgaagaacccuuucuauucuuuaaaacaaucagacacauuuaccuacugaugcccuaguaguuacacaucaucacguggcuucuugguuauugaaggaguuugaccucucugccaggcugcgacaugcacagccuaggaggcaccucagugcuucgcauuguccuggauacaaaacaguugcuuaauagguauguguuggauuggacugaauggcaaccagccagcuccaaaauuccagccaccaccuggugaccagcauuuuuucugccuuugaaauaguggguuuggugacuugaggauaugcucgugguggcaggcaguuugggcucugguuggucguggcuugggcagcccugcuggaggcaggccacaaaaaguggcagcucccacaccugggcugcacaagagauggaaggugagugcuucacgcaggcaaacccaggaauaaaauagcuuuggacuuuauuuaaauguauccauuccaggagcauaggccuggaagaagcccaggccccaagaaguugugacuguccccugggcuuccuauggcaccaggcauugaagcauguccugguggccgggaguggcuggggcagagggcggugaagagaguggcuauagggaguuuagggugaggacccacccccgggccuagagggccacagugcgcaggcucauuggaggaucuucccuccggccaccucuccugcaccuccagaccacugucccgaugaugcccaccacaaggccgacucccgcugccacugggacagcccaguagagcaccucgggggcuucuucagccuggucugggagcaaucggcuguuccgcaggguguagagguaagggcucucaggagaggggcacuugaguuuggcucggcugugggugaaguuguuggagguagucuugcggcccacugguuccagcauguuguuccagagugcgauggccaucucggcaugcccgcggucugagaagugaaaacaguccucggagaagaaggugaggucaguguccccucucucguucaguggggugaguguguuuuggaagaaaggcugcaccacaaccgcaaaguccucacgcuguguguauuggugccaguaggagaaacuggagaugccaugcuggagguuccaguucacuuucuucaguucuugcuucuccagggagcuuugcgagugucugaggcaagugcaguuguucugagcugccagcauggcacauuucccgccuuggcccugguacaggcuagccagcuccaugaccuccaccacguugacgaaagcccuugggagcuccucagagaggauguccagggccuguuggaugugcugaacauauuccguggccaagugggccuccggauucucacaguaaugacacaagucguugaccccaaugaagagugugaccagcuuccagucuuucuccagguugaugucggggcuguuuuucauucgcucuaccaggucccaggccugggcuggcaugucccuagcucuggccccuuccgcugccacauuuaguccugcuguccccucccaggugcugguagagaagccaaggagguaaggguugaacuucuucagaauguugggcaguguggugugagucuccaaguucccauccccuccaaugcuccaagagaguccccuccaagauguggguaggucacuggaguuguuuggucgagcucccacugcuguagucagagagucacccagggcggccaccacuuugaugucugcuggucggagcugguggacagagguuggaacacuauuggaagccuuccacucuguacacaggaagucacugccccaguucucaauggcuggcuugaugggguacguguaguuacuauuccgagggguucucaggaagggcucauucugagugggacaggugaugggcaucucugcucucagguccagggucucuguuuugcuuccaagugguucaagcauauugguccaaagggcucuggccagcugggaguggaauuucugauuuggguggaugcagucuggggcaaagaaggacguaucugggagcccauccgccaggacagggagcuggauguucuggaagaagggcugcagcaccacagagaaguccuccugcgugucauagcggccugaccccaccagcucgcgcaugcugcuccgguaggcucggcugaaggccuccagccuggcuagcucuugggaguucucccgcagggucagaacgcaguuacacaaaacgcuggccugcugcacugggcacuugucuggguuucccaggaacaccugccgcaugauagugggguucaggaaguccacgagguugaccaggacucugggcaccucucuaugcaggacguccaaggcauugcggagauggugaacaaaguuggcugcagaauacagauucgaaucugugcaguagucacauaaaucgcugccuccgaucagcacugugaugaccuuccagucuucauggaaauuuacucuaugaucaucuuucaucuucugcaucagaguuuggacuuggcucauaagauccucagccuuugcuccgggaacagcuugauugaggaaugcauucgugucauuggcaucacccgugcccacggcguagccugugagguuucuguuaaacucccgaaggauauuagguaagguggucacauucuccagggagccguccccuccugcacuguaugacaguccccgauacuguguggugacaucggggaggucgucugguuuggagccaauuccauugccagcggucagagaaucccccagagcagccacaacuuggaugucugcaggucucagggcaugcacugagguagggugcaaggcagaaggggcucugucccugcauggcagccaggucccaugacccugcaugcuguucuuguagguccucagaaacggcuggaccugguucggacaugugauauugaucuuguuuucaaacuuaugacgagucgucuucuggccaacaggcuccagcauauuguuccagagagcacuggcugcucgggagugagacuugcugcugaaguggaaacagucaggagcgaagaaagaguugucaggcaauccuuccgaggucuuuggcauguccacguuuucaaagaacggcugcacaaccacaguaaaaucuucccuugugucauaucgcccacucucaaucaguuggugggucuucuccugaaacuucuuguugaauucgaugaggguagcaaguucuguugaguuaucaucaaacuucaggacacagggacacagagaccugaggaucauccuugggcaguagacuuuuuucuccugguacagcucccucagguugacgaucucaagcaccgucaccagguucacaaaugcccgaggaaccagaucauugcagaaaucacagaggucauugccgccuauaaacaggguuauuaucuuccagucuuccugaaaguguauccucgugucauucuucaucagguccaccagccuccuggccuggacagguagauccucagcucggccuccugccacagccugguuuaagaaggcauuaggacugguuucuuucccagugccaacagagaagcccuucagggaaggguugaauucccggaggauguucgccagggugguaacggugccgauguucucaucuccgccgacgcuccaggacaggccucgguacugagucaagacguccaagacguucccagguguggacccggccccauugccugccgugagagagucacccagggcuccaauuacguugaugucagccggcuucagccuaugaacugaggugggaaccguaucggaggggucuuugucaggacaucugauuuccgcuccuucucuuaccucaagcuugucuugggguuucugcagucuggucagguaguugcuguuucuguagcugaacagauaggggcucuccugagagggacacuucauuggccucccguguuuuacacucaauggcucaucuuucucuccugcuggcuccaucauccuauuccagagaugccaggccagcgugguagaauccuggagucggggguccuccgaguguagagaugggguggucucauagaagaaaggcuggaaaaccacggugaaggacuccugcucacuguaccugcuggaggccaggaggcuguuccaggcuuccugauaagaccacugcaucaccaccuuggccagccggguggucuccucugagcaauuacagggcucuggugcagggcugagccaagugccgugauacugacgagagaccucugcaaccucagagagguccaccagguuuacaaaugcucuggggaccuccugcugcagguaguccagcacccccaucagcucauccacgccgcccgccgcaagcccauucugugagaggagaaccgugcuaagugagggugccuguugagcagaggggcacagguaacacuggcuugcauuacugaagaacacauugaugagcuuccagucaaauugaaagucaaguugcagguucucuuucauguuucucaccaguucuugagccugaauccacaagucuucagcaccaucgugggguaugacucucuuuccaguguggcacacaggcauuggaacagaaggacugaaauaucugaugaugucugaaaggacugucaucacucccaugcacaccugcuguggccuuucaguccagucuugcuucuccagaucgcccgucccugggucuggaggaauuuccagauugccaauggcugccacaaauuuaauaucagaaggcuucagagagugaacugauuuagaaggcauauucacuccuaauuuauuuggguugcaugggaauggagaauucuucagggucucuggccauagcugcccuuccaauguacucuuucuaggagagguauggaucugagggguccccuccagcagccgggugaugaggcuguccacguucagcuccccguccgccaucuugucggcacagacucuccuucccagcagcgggaacaagggcuucucggcggcggaggcugcggcgacggcucggcguucucucaccuacaagucacgcggcguuucgaccccggcuccaacucccccuuuucccgggcccuccccccacccccuccccgccggguagcgagagcgcgcgcacacucggaggcacccacggaaaauaaauaaauaaacaagagaggcccccucgaacagggccgcgucagacccaggccgccaccuccuccuccucggcaccgcccagcuccgcaaagcucaccagcgccgccgacggccccacccgcagcgccacucacuccgcacgucccuugcgcgccgcc

SEQ ID NO: 2193 - RNA, 3984 nt, Homo sapiens
uugugucccaaucauuuuuuauuccuuuucccaaaaugacaugugaagguugcucucccccaagaaacuuuccccgaagaacccuuucuauucuuuaaaacaaucagacacauuuaccuacugaugcccuaguaguuacacaucaucacguggcuucuugguuauugaaggaguuugaccucucugccaggcugcgacaugcacagccuaggaggcaccucagugcuucgcauuguccuggauacaaaacaguugcuuaauagguauguguuggauuggacugaauggcaaccagccagcuccaaaauuccagccaccaccuggugaccagcauuuuuucugccuuugaaauaguggguuuggugacuugaggauaugcucgugguggcaggcaguuugggcucugguuggucguggcuugggcagcccugcuggaggcaggccacaaaaaguggcagcucccacaccugggcugcacaagagauggaaggugagugcuucacgcaggcaaacccaggaauaaaauagcuuuggacuuuauuuaaauguauccauuccaggagcauaggccuggaagaagcccaggccccaagaaguugugacuguccccugggcuuccuauggcaccaggcauugaagcauguccugguggccgggaguggcuggggcagagggcggugaagagaguggcuauagggaguuuagggugaggacccacccccgggccuagagggccacagugcgcaggcucauuggaggaucuucccuccggccaccucuccugcaccuccagaccacugucccgaugaugcccaccacaaggccgacucccgcugccacugggacagcccaguagagcaccucgggggcuucuucagccuggucugggagcaaucggcuguuccgcaggguguagagguaagggcucucaggagaggggcacuugaguuuggcucggcugugggugaaguuguuggagguagucuugcggcccacugguuccagcauguuguuccagagugcgauggccaucucggcaugcccgcggucugagaagugaaaacaguccucggagaagaaggugaggucaguguccccucucucguucaguggggugaguguguuuuggaagaaaggcugcaccacaaccgcaaaguccucacgcuguguguauuggugccaguaggagaaacuggagaugccaugcuggagguuccaguucacuuucuucaguucuugcuucuccagggagcuuugcgagugucugaggcaagugcaguuguucugagcugccagcauggcacauuucccgccuuggcccugguacaggcuagccagcuccaugaccuccaccacguugacgaaagcccuugggagcuccucagagaggauguccagggccuguuggaugugcugaacauauuccguggccaagugggccuccggauucucacaguaaugacacaagucguugaccccaaugaagagugugaccagcuuccagucuuucuccagguugaugucggggcuguuuuucauucgcucuaccaggucccaggccugggcuggcaugucccuagcucuggccccuuccgcugccacauuuaguccugcuguccccucccaggugcugguagagaagccaaggagguaaggguugaacuucuucagaauguugggcaguguggugugagucuccaaguucccauccccuccaaugcuccaagagaguccccuccaagauguggguaggucacuggaguuguuuggucgagcucccacugcuguagucagagagucacccagggcggccaccacuuugaugucugcuggucggagcugguggacagagguuggaacacuauuggaagccuuccacucuguacacaggaagucacugccccaguucucaauggcuggcuugaugggguacguguaguuacuauuccgagggguucucaggaagggcucauucugagugggacaggugaugggcaucucugcucucagguccagggucucuguuuugcuuccaagugguucaagcauauugguccaaagggcucuggccagcugggaguggaauuucugauuuggguggaugcagucuggggcaaagaaggacguaucugggagcccauccgccaggacagggagcuggauguucuggaagaagggcugcagcaccacagagaaguccuccugcgugucauagcggccugaccccaccagcucgcgcaugcugcuccgguaggcucggcugaaggccuccagccuggcuagcucuugggaguucucccgcagggucagaacgcaguuacacaaaacgcuggccugcugcacugggcacuugucuggguuucccaggaacaccugccgcaugauagugggguucaggaaguccacgagguugaccaggacucugggcaccucucuaugcaggacguccaaggcauugcggagauggugaacaaaguuggcugcagaauacagauucgaaucugugcaguagucacauaaaucgcugccuccgaucagcacugugaugaccuuccagucuucauggaaauuuacucuaugaucaucuuucaucuucugcaucagaguuuggacuuggcucauaagauccucagccuuugcuccgggaacagcuugauugaggaaugcauucgugucauuggcaucacccgugcccacggcguagccugugagguuucuguuaaacucccgaaggauauuagguaagguggucacauucuccagggagccguccccuccugcacuguaugacaguccccgauacuguguggugacaucggggaggucgucugguuuggagccaauuccauugccagcggucagagaaucccccagagcagccacaacuuggaugucugcaggucucagggcaugcacugagguagggugcaaggcagaaggggcucugucccugcauggcagccaggucccaugacccugcaugcuguucuuguagguccucagaaacggcuggaccugguucggacaugugauauugaucuuguuuucaaacuuaugacgagucgucuucuggccaacaggcuccagcauauuguuccagagagcacuggcugcucgggagugagacuugcugcugaaguggaaacagucaggagcgaagaaagaguugucaggcaauccuuccgaggucuuuggcauguccacguuuucaaagaacggcugcacaaccacaguaaaaucuucccuugugucauaucgcccacucucaaucaguuggugggucuucuccugaaacuucuuguugaauucgaugaggguagcaaguucuguugaguuaucaucaaacuucaggacacagggacacagagaccugaggaucauccuugggcaguagacuuuuuucuccugguacagcucccucagguugacgaucucaagcaccgucaccagguucacaaaugcccgaggaaccucagcauggaggauguccagggccuuuccaauguugucugugaaguucuggggagaauaguggaccagaucauugcagaaaucacagaggucauugccgccuauaaacaggguuauuaucuuccagucuuccugaaaguguauccucgugucauucuucaucagguccaccagccuccuggccuggacagguagauccucagcucggccuccugccacagccugguuuaagaaggcauuaggacugguuucuuucccagugccaacagagaagcccuucagggaaggguugaauucccggaggaugucacaaauuuucagcggugcuuccaauuccaaaagaauaggcuggcugagaaagaucucccgagacuugauacauaagccucgaacuucugcuucagucaucugcacaaucuuuccuggacgacauccucguacagcgccgccgacggccccacccgcagcgccacucacuccgcacgucccuugcgcgccgccgcgucacgcagc

SEQ ID NO: 2194 - RNA, 2943 nt, Homo sapiens
uugugucccaaucauuuuuuauuccuuuucccaaaaugacaugugaagguugcucucccccaagaaacuuuccccgaagaacccuuucuauucuuuaaaacaaucagacacauuuaccuacugaugcccuaguaguuacacaucaucacguggcuucuugguuauugaaggaguuugaccucucugccaggcugcgacaugcacagccuaggaggcaccucagugcuucgcauuguccuggauacaaaacaguugcuuaauagguauguguuggauuggacugaauggcaaccagccagcuccaaaauuccagccaccaccuggugaccagcauuuuuucugccuuugaaauaguggguuuggugacuugaggauaugcucgugguggcaggcaguuugggcucugguuggucguggcuugggcagcccugcuggaggcaggccacaaaaaguggcagcucccacaccugggcugcacaagagauggaaggugagugcuucacgcaggcaaacccaggaauaaaauagcuuuggacuuuauuuaaauguauccauuccaggagcauaggccuggaagaagcccaggccccaagaaguugugacuguccccugggcuuccuauggcaccaggcauugaagcauguccugguggccgggaguggcuggggcagagggcggugaagagaguggcuauagggaguuuagggugaggacccacccccgggccuagagggccacagugcgcaggcucauuggaggaucuucccuccggccaccucuccugcaccuccagaccacugucccgaugaugcccaccacaaggccgacucccgcugccacugggacagcccaguagagcaccucgggggcuucuucagccuggucugggagcaaucggcuguuccgcaggguguagagguaagggcucucaggagaggggcacuugaguuuggcucggcugugggugaaguuguuggagguagucuugcggcccacugguuccagcauguuguuccagagugcgauggccaucucggcaugcccgcggucugagaagugaaaacaguccucggagaagaaggugaggucaguguccccucucucguucaguggggugaguguguuuuggaagaaaggcugcaccacaaccgcaaaguccucacgcuguguguauuggugccaguaggagaaacuggagaugccaugcuggagguuccaguucacuuucuucaguucuugcuucuccagggagcuuugcgagugucugaggcaagugcaguuguucugagcugccagcauggcacauuucccgccuuggcccugguacaggcuagccagcuccaugaccuccaccacguugacgaaagcccuugggagcuccucagagaggauguccagggccuguuggaugugcugaacauauuccguggccaagugggccuccggauucucacaguaaugacacaagucguugaccccaaugaagagugugaccagcuuccagucuuucuccagguugaugucggggcuguuuuucauucgcucuaccaggucccaggccugggcuggcaugucccuagcucuggccccuuccgcugccacauuuaguccugcuguccccucccaggugcugguagagaagccaaggagguaaggguugaacuucuucagaauguugggcaguguggugugagucuccaaguucccauccccuccaaugcuccaagagaguccccuccaagauguggguaggucacuggaguuguuuggucgagcucccacugcuguagucagagagucacccagggcggccaccacuuugaugucugcuggucggagcugguggacagagguuggaacacuauuggaagccuuccacucuguacacaggaagucacugccccaguucucaauggcuggcuugaugggguacguguaguuacuauuccgagggguucucaggaagggcucauucugagugggacaggugaugggcaucucugcucucagguccagggucucuguuuugcuuccaagugguucaagcauauugguccaaagggcucuggccagcugggaguggaauuucugauuuggguggaugcagucuggggcaaagaaggacguaucugggagcccauccgccaggacagggagcuggauguucuggaagaagggcugcagcaccacagagaaguccuccugcgugucauagcggccugaccccaccagcucgcgcaugcugcuccgguaggcucggcugaaggccuccagccuggcuagcucuugggaguucucccgcagggucagaacgcaguuacacaaaacgcuggccugcugcacugggcacuugucuggguuucccaggaacaccugccgcaugauagugggguucaggaaguccacgagguugaccaggacucugggcaccucucuaugcaggacguccaaggcauugcggagauggugaacaaaguuggcugcagaauacagauucgaaucugugcaguagucacauaaaucgcugccuccgaucagcacugugaugaccuuccagucuucauggaaauuuacucuaugaucaucuuucaucuucugcaucagaguuuggacuuggcucauaagauccucagccuuugcuccgggaacagcuugauugaggaaugcauucgugucauuggcaucacccgugcccacggcguagccugugagguuucuguuaaacucccgaaggauaucacaaauuuucagcggugcuuccaauuccaaaagaauaggcuggcugagaaagaucucccgagacuugauacauaagccucgaacuucugcuucagucaucugcacaaucuuuccuggacgacauccucguacagcgccgccgacggccccacccgcagcgccacucacuccgcacgucccuugcgcgccgccgcgucacgcagc

SEQ ID NO: 2195 - RNA, 4262 nt, Homo sapiens
uugugucccaaucauuuuuuauuccuuuucccaaaaugacaugugaagguugcucucccccaagaaacuuuccccgaagaacccuuucuauucuuuaaaacaaucagacacauuuaccuacugaugcccuaguaguuacacaucaucacguggcuucuugguuauugaaggaguuugaccucucugccaggcugcgacaugcacagccuaggaggcaccucagugcuucgcauuguccuggauacaaaacaguugcuuaauagguauguguuggauuggacugaauggcaaccagccagcuccaaaauuccagccaccaccuggugaccagcauuuuuucugccuuugaaauaguggguuuggugacuugaggauaugcucgugguggcaggcaguuugggcucugguuggucguggcuugggcagcccugcuggaggcaggccacaaaaaguggcagcucccacaccugggcugcacaagagauggaaggugagugcuucacgcaggcaaacccaggaauaaaauagcuuuggacuuuauuuaaauguauccauuccaggagcauaggccuggaagaagcccaggccccaagaaguugugacuguccccugggcuuccuauggcaccaggcauugaagcauguccugguggccgggaguggcuggggcagagggcggugaagagaguggcuauagggaguuuagggugaggacccacccccgggccuagagggccacagugcgcaggcucauuggaggaucuucccuccggccaccucuccugcaccuccagaccacugucccgaugaugcccaccacaaggccgacucccgcugccacugggacagcccaguagagcaccucgggggcuucuucagccuggucugggagcaaucggcuguuccgcaggguguagagguaagggcucucaggagaggggcacuugaguuuggcucggcugugggugaaguuguuggagguagucuugcggcccacugguuccagcauguuguuccagagugcgauggccaucucggcaugcccgcggucugagaagugaaaacaguccucggagaagaaggugaggucaguguccccucucucguucaguggggugaguguguuuuggaagaaaggcugcaccacaaccgcaaaguccucacgcuguguguauuggugccaguaggagaaacuggagaugccaugcuggagguuccaguucacuuucuucaguucuugcuucuccagggagcuuugcgagugucugaggcaagugcaguuguucugagcugccagcauggcacauuucccgccuuggcccugguacaggcuagccagcuccaugaccuccaccacguugacgaaagcccuugggagcuccucagagaggauguccagggccuguuggaugugcugaacauauuccguggccaagugggccuccggauucucacaguaaugacacaagucguugaccccaaugaagagugugaccagcuuccagucuuucuccagguugaugucggggcuguuuuucauucgcucuaccaggucccaggccugggcuggcaugucccuagcucuggccccuuccgcugccacauuuaguccugcuguccccucccaggugcugguagagaagccaaggagguaaggguugaacuucuucagaauguugggcaguguggugugagucuccaaguucccauccccuccaaugcuccaagagaguccccuccaagauguggguaggucacuggaguuguuuggucgagcucccacugcuguagucagagagucacccagggcggccaccacuuugaugucugcuggucggagcugguggacagagguuggaacacuauuggaagccuuccacucuguacacaggaagucacugccccaguucucaauggcuggcuugaugggguacguguaguuacuauuccgagggguucucaggaagggcucauucugagugggacaggugaugggcaucucugcucucagguccagggucucuguuuugcuuccaagugguucaagcauauugguccaaagggcucuggccagcugggaguggaauuucugauuuggguggaugcagucuggggcaaagaaggacguaucugggagcccauccgccaggacagggagcuggauguucuggaagaagggcugcagcaccacagagaaguccuccugcgugucauagcggccugaccccaccagcucgcgcaugcugcuccgguaggcucggcugaaggccuccagccuggcuagcucuugggaguucucccgcagggucagaacgcaguuacacaaaacgcuggccugcugcacugggcacuugucuggguuucccaggaacaccugccgcaugauagugggguucaggaaguccacgagguugaccaggacucugggcaccucucuaugcaggacguccaaggcauugcggagauggugaacaaaguuggcugcagaauacagauucgaaucugugcaguagucacauaaaucgcugccuccgaucagcacugugaugaccuuccagucuucauggaaauuuacucuaugaucaucuuucaucuucugcaucagaguuuggacuuggcucauaagauccucagccuuugcuccgggaacagcuugauugaggaaugcauucgugucauuggcaucacccgugcccacggcguagccugugagguuucuguuaaacucccgaaggauauuagguaagguggucacauucuccagggagccguccccuccugcacuguaugacaguccccgauacuguguggugacaucggggaggucgucugguuuggagccaauuccauugccagcggucagagaaucccccagagcagccacaacuuggaugucugcaggucucagggcaugcacugagguagggugcaaggcagaaggggcucugucccugcauggcagccaggucccaugacccugcaugcuguucuuguagguccucagaaacggcuggaccugguucggacaugugauauugaucuuguuuucaaacuuaugacgagucgucuucuggccaacaggcuccagcauauuguuccagagagcacuggcugcucgggagugagacuugcugcugaaguggaaacagucaggagcgaagaaagaguugucaggcaauccuuccgaggucuuuggcauguccacguuuucaaagaacggcugcacaaccacaguaaaaucuucccuugugucauaucgcccacucucaaucaguuggugggucuucuccugaaacuucuuguugaauucgaugaggguagcaaguucuguugaguuaucaucaaacuucaggacacagggacacagagaccugaggaucauccuugggcaguagacuuuuuucuccugguacagcucccucagguugacgaucucaagcaccgucaccagguucacaaaugcccgaggaaccagaucauugcagaaaucacagaggucauugccgccuauaaacaggguuauuaucuuccagucuuccugaaaguguauccucgugucauucuucaucagguccaccagccuccuggccuggacagguagauccucagcucggccuccugccacagccugguuuaagaaggcauuaggacugguuucuuucccagugccaacagagaagcccuucagggaaggguugaauucccggaggaugucacaaauuuucagcggugcuuccaauuccaaaagaauaggcuggcugagaaagaucucccgagacuugauacauaagccucgaacuucugcuucagucaucugcacaaucuuuccuggacgacauccucguaccuccagcagccgggugaugaggcuguccacguucagcuccccguccgccaucuugucggcacagacucuccuucccagcagcgggaacaagggcuucucggcggcggaggcugcggcgacggcucggcguucucucaccuacaagucacgcggcguuucgaccccggcuccaacucccccuuuucccgggcccuccccccacccccuccccgccggguagcgagagcgcgcgcacacucggaggcacccacggaaaauaaauaaauaaacaagagaggcccccucgaacagggccgcgucagacccaggccgccaccuccuccuccucggcaccgcccagcuccgcaaagcucaccagcgccgccgacggccccacccgcagcgccacucacuccgcacgucccuugcgcgccgcc

SEQ ID NO: 2196 - RNA, 4373 nt, Homo sapiens
uugugucccaaucauuuuuuauuccuuuucccaaaaugacaugugaagguugcucucccccaagaaacuuuccccgaagaacccuuucuauucuuuaaaacaaucagacacauuuaccuacugaugcccuaguaguuacacaucaucacguggcuucuugguuauugaaggaguuugaccucucugccaggcugcgacaugcacagccuaggaggcaccucagugcuucgcauuguccuggauacaaaacaguugcuuaauagguauguguuggauuggacugaauggcaaccagccagcuccaaaauuccagccaccaccuggugaccagcauuuuuucugccuuugaaauaguggguuuggugacuugaggauaugcucgugguggcaggcaguuugggcucugguuggucguggcuugggcagcccugcuggaggcaggccacaaaaaguggcagcucccacaccugggcugcacaagagauggaaggugagugcuucacgcaggcaaacccaggaauaaaauagcuuuggacuuuauuuaaauguauccauuccaggagcauaggccuggaagaagcccaggccccaagaaguugugacuguccccugggcuuccuauggcaccaggcauugaagcauguccugguggccgggaguggcuggggcagagggcggugaagagaguggcuauagggaguuuagggugaggacccacccccgggccuagagggccacagugcgcaggcucauuggaggaucuucccuccggccaccucuccugcaccuccagaccacugucccgaugaugcccaccacaaggccgacucccgcugccacugggacagcccaguagagcaccucgggggcuucuucagccuggucugggagcaaucggcuguuccgcaggguguagagguaagggcucucaggagaggggcacuugaguuuggcucggcugugggugaaguuguuggagguagucuugcggcccacugguuccagcauguuguuccagagugcgauggccaucucggcaugcccgcggucugagaagugaaaacaguccucggagaagaaggugaggucaguguccccucucucguucaguggggugaguguguuuuggaagaaaggcugcaccacaaccgcaaaguccucacgcuguguguauuggugccaguaggagaaacuggagaugccaugcuggagguuccaguucacuuucuucaguucuugcuucuccagggagcuuugcgagugucugaggcaagugcaguuguucugagcugccagcauggcacauuucccgccuuggcccugguacaggcuagccagcuccaugaccuccaccacguugacgaaagcccuugggagcuccucagagaggauguccagggccuguuggaugugcugaacauauuccguggccaagugggccuccggauucucacaguaaugacacaagucguugaccccaaugaagagugugaccagcuuccagucuuucuccagguugaugucggggcuguuuuucauucgcucuaccaggucccaggccugggcuggcaugucccuagcucuggccccuuccgcugccacauuuaguccugcuguccccucccaggugcugguagagaagccaaggagguaaggguugaacuucuucagaauguugggcaguguggugugagucuccaaguucccauccccuccaaugcuccaagagaguccccuccaagauguggguaggucacuggaguuguuuggucgagcucccacugcuguagucagagagucacccagggcggccaccacuuugaugucugcuggucggagcugguggacagagguuggaacacuauuggaagccuuccacucuguacacaggaagucacugccccaguucucaauggcuggcuugaugggguacguguaguuacuauuccgagggguucucaggaagggcucauucugagugggacaggugaugggcaucucugcucucagguccagggucucuguuuugcuuccaagugguucaagcauauugguccaaagggcucuggccagcugggaguggaauuucugauuuggguggaugcagucuggggcaaagaaggacguaucugggagcccauccgccaggacagggagcuggauguucuggaagaagggcugcagcaccacagagaaguccuccugcgugucauagcggccugaccccaccagcucgcgcaugcugcuccgguaggcucggcugaaggccuccagccuggcuagcucuugggaguucucccgcagggucagaacgcaguuacacaaaacgcuggccugcugcacugggcacuugucuggguuucccaggaacaccugccgcaugauagugggguucaggaaguccacgagguugaccaggacucugggcaccucucuaugcaggacguccaaggcauugcggagauggugaacaaaguuggcugcagaauacagauucgaaucugugcaguagucacauaaaucgcugccuccgaucagcacugugaugaccuuccagucuucauggaaauuuacucuaugaucaucuuucaucuucugcaucagaguuuggacuuggcucauaagauccucagccuuugcuccgggaacagcuugauugaggaaugcauucgugucauuggcaucacccgugcccacggcguagccugugagguuucuguuaaacucccgaaggauauuagguaagguggucacauucuccagggagccguccccuccugcacuguaugacaguccccgauacuguguggugacaucggggaggucgucugguuuggagccaauuccauugccagcggucagagaaucccccagagcagccacaacuuggaugucugcaggucucagggcaugcacugagguagggugcaaggcagaaggggcucugucccugcauggcagccaggucccaugacccugcaugcuguucuuguagguccucagaaacggcuggaccugguucggacaugugauauugaucuuguuuucaaacuuaugacgagucgucuucuggccaacaggcuccagcauauuguuccagagagcacuggcugcucgggagugagacuugcugcugaaguggaaacagucaggagcgaagaaagaguugucaggcaauccuuccgaggucuuuggcauguccacguuuucaaagaacggcugcacaaccacaguaaaaucuucccuugugucauaucgcccacucucaaucaguuggugggucuucuccugaaacuucuuguugaauucgaugaggguagcaaguucuguugaguuaucaucaaacuucaggacacagggacacagagaccugaggaucauccuugggcaguagacuuuuuucuccugguacagcucccucagguugacgaucucaagcaccgucaccagguucacaaaugcccgaggaaccucagcauggaggauguccagggccuuuccaauguugucugugaaguucuggggagaauaguggaccagaucauugcagaaaucacagaggucauugccgccuauaaacaggguuauuaucuuccagucuuccugaaaguguauccucgugucauucuucaucagguccaccagccuccuggccuggacagguagauccucagcucggccuccugccacagccugguuuaagaaggcauuaggacugguuucuuucccagugccaacagagaagcccuucagggaaggguugaauucccggaggauguucgccagggugguaacggugccgauguucucaucuccgccgacgcuccaggacaggccucgguacugagucaagacguccaagacguucccagguguggacccggccccauugccugccgugagagagucacccagggcuccaauuacguugaugucagccggcuucagccuaugaaccuccagcagccgggugaugaggcuguccacguucagcuccccguccgccaucuugucggcacagacucuccuucccagcagcgggaacaagggcuucucggcggcggaggcugcggcgacggcucggcguucucucaccuacaagucacgcggcguuucgaccccggcuccaacucccccuuuucccgggcccuccccccacccccuccccgccggguagcgagagcgcgcgcacacucggaggcacccacggaaaauaaauaaauaaacaagagaggcccccucgaacagggccgcgucagacccaggccgccaccuccuccuccucggcaccgcccagcuccgcaaagcucaccagcgccgccgacggccccacccgcagcgccacucacuccgcacgucccuugcgcgccgcc

SEQ ID NO: 2197 - RNA, 4307 nt, Homo sapiens
uugugucccaaucauuuuuuauuccuuuucccaaaaugacaugugaagguugcucucccccaagaaacuuuccccgaagaacccuuucuauucuuuaaaacaaucagacacauuuaccuacugaugcccuaguaguuacacaucaucacguggcuucuugguuauugaaggaguuugaccucucugccaggcugcgacaugcacagccuaggaggcaccucagugcuucgcauuguccuggauacaaaacaguugcuuaauagguauguguuggauuggacugaauggcaaccagccagcuccaaaauuccagccaccaccuggugaccagcauuuuuucugccuuugaaauaguggguuuggugacuugaggauaugcucgugguggcaggcaguuugggcucugguuggucguggcuugggcagcccugcuggaggcaggccacaaaaaguggcagcucccacaccugggcugcacaagagauggaaggugagugcuucacgcaggcaaacccaggaauaaaauagcuuuggacuuuauuuaaauguauccauuccaggagcauaggccuggaagaagcccaggccccaagaaguugugacuguccccugggcuuccuauggcaccaggcauugaagcauguccugguggccgggaguggcuggggcagagggcggugaagagaguggcuauagggaguuuagggugaggacccacccccgggccuagagggccacagugcgcaggcucauuggaggaucuucccuccggccaccucuccugcaccuccagaccacugucccgaugaugcccaccacaaggccgacucccgcugccacugggacagcccaguagagcaccucgggggcuucuucagccuggucugggagcaaucggcuguuccgcaggguguagagguaagggcucucaggagaggggcacuugaguuuggcucggcugugggugaaguuguuggagguagucuugcggcccacugguuccagcauguuguuccagagugcgauggccaucucggcaugcccgcggucugagaagugaaaacaguccucggagaagaaggugaggucaguguccccucucucguucaguggggugaguguguuuuggaagaaaggcugcaccacaaccgcaaaguccucacgcuguguguauuggugccaguaggagaaacuggagaugccaugcuggagguuccaguucacuuucuucaguucuugcuucuccagggagcuuugcgagugucugaggcaagugcaguuguucugagcugccagcauggcacauuucccgccuuggcccugguacaggcuagccagcuccaugaccuccaccacguugacgaaagcccuugggagcuccucagagaggauguccagggccuguuggaugugcugaacauauuccguggccaagugggccuccggauucucacaguaaugacacaagucguugaccccaaugaagagugugaccagcuuccagucuuucuccagguugaugucggggcuguuuuucauucgcucuaccaggucccaggccugggcuggcaugucccuagcucuggccccuuccgcugccacauuuaguccugcuguccccucccaggugcugguagagaagccaaggagguaaggguugaacuucuucagaauguugggcaguguggugugagucuccaaguucccauccccuccaaugcuccaagagaguccccuccaagauguggguaggucacuggaguuguuuggucgagcucccacugcuguagucagagagucacccagggcggccaccacuuugaugucugcuggucggagcugguggacagagguuggaacacuauuggaagccuuccacucuguacacaggaagucacugccccaguucucaauggcuggcuugaugggguacguguaguuacuauuccgagggguucucaggaagggcucauucugagugggacaggugaugggcaucucugcucucagguccagggucucuguuuugcuuccaagugguucaagcauauugguccaaagggcucuggccagcugggaguggaauuucugauuuggguggaugcagucuggggcaaagaaggacguaucugggagcccauccgccaggacagggagcuggauguucuggaagaagggcugcagcaccacagagaaguccuccugcgugucauagcggccugaccccaccagcucgcgcaugcugcuccgguaggcucggcugaaggccuccagccuggcuagcucuugggaguucucccgcagggucagaacgcaguuacacaaaacgcuggccugcugcacugggcacuugucuggguuucccaggaacaccugccgcaugauagugggguucaggaaguccacgagguugaccaggacucugggcaccucucuaugcaggacguccaaggcauugcggagauggugaacaaaguuggcugcagaauacagauucgaaucugugcaguagucacauaaaucgcugccuccgaucagcacugugaugaccuuccagucuucauggaaauuuacucuaugaucaucuuucaucuucugcaucagaguuuggacuuggcucauaagauccucagccuuugcuccgggaacagcuugauugaggaaugcauucgugucauuggcaucacccgugcccacggcguagccugugagguuucuguuaaacucccgaaggauauuagguaagguggucacauucuccagggagccguccccuccugcacuguaugacaguccccgauacuguguggugacaucggggaggucgucugguuuggagccaauuccauugccagcggucagagaaucccccagagcagccacaacuuggaugucugcaggucucagggcaugcacugagguagggugcaaggcagaaggggcucugucccugcauggcagccaggucccaugacccugcaugcuguucuuguagguccucagaaacggcuggaccugguucggacaugugauauugaucuuguuuucaaacuuaugacgagucgucuucuggccaacaggcuccagcauauuguuccagagagcacuggcugcucgggagugagacuugcugcugaaguggaaacagucaggagcgaagaaagaguugucaggcaauccuuccgaggucuuuggcauguccacguuuucaaagaacggcugcacaaccacaguaaaaucuucccuugugucauaucgcccacucucaaucaguuggugggucuucuccugaaacuucuuguugaauucgaugaggguagcaaguucuguugaguuaucaucaaacuucaggacacagggacacagagaccugaggaucauccuugggcaguagacuuuuuucuccugguacagcucccucagguugacgaucucaagcaccgucaccagguucacaaaugcccgaggaaccagaucauugcagaaaucacagaggucauugccgccuauaaacaggguuauuaucuuccagucuuccugaaaguguauccucgugucauucuucaucagguccaccagccuccuggccuggacagguagauccucagcucggccuccugccacagccugguuuaagaaggcauuaggacugguuucuuucccagugccaacagagaagcccuucagggaaggguugaauucccggaggauguucgccagggugguaacggugccgauguucucaucuccgccgacgcuccaggacaggccucgguacugagucaagacguccaagacguucccagguguggacccggccccauugccugccgugagagagucacccagggcuccaauuacguugaugucagccggcuucagccuaugaaccuccagcagccgggugaugaggcuguccacguucagcuccccguccgccaucuugucggcacagacucuccuucccagcagcgggaacaagggcuucucggcggcggaggcugcggcgacggcucggcguucucucaccuacaagucacgcggcguuucgaccccggcuccaacucccccuuuucccgggcccuccccccacccccuccccgccggguagcgagagcgcgcgcacacucggaggcacccacggaaaauaaauaaauaaacaagagaggcccccucgaacagggccgcgucagacccaggccgccaccuccuccuccucggcaccgcccagcuccgcaaagcucaccagcgccgccgacggccccacccgcagcgccacucacuccgcacgucccuugcgcgccgcc

SEQ ID NO: 2198 - RNA, 5465 nt, Homo sapiens
uugugucccaaucauuuuuuauuccuuuucccaaaaugacaugugaagguugcucucccccaagaaacuuuccccgaagaacccuuucuauucuuuaaaacaaucagacacauuuaccuacugaugcccuaguaguuacacaucaucacguggcuucuugguuauugaaggaguuugaccucucugccaggcugcgacaugcacagccuaggaggcaccucagugcuucgcauuguccuggauacaaaacaguugcuuaauagguauguguuggauuggacugaauggcaaccagccagcuccaaaauuccagccaccaccuggugaccagcauuuuuucugccuuugaaauaguggguuuggugacuugaggauaugcucgugguggcaggcaguuugggcucugguuggucguggcuugggcagcccugcuggaggcaggccacaaaaaguggcagcucccacaccugggcugcacaagagauggaaggugagugcuucacgcaggcaaacccaggaauaaaauagcuuuggacuuuauuuaaauguauccauuccaggagcauaggccuggaagaagcccaggccccaagaaguugugacuguccccugggcuuccuauggcaccaggcauugaagcauguccugguggccgggaguggcuggggcagagggcggugaagagaguggcuauagggaguuuagggugaggacccacccccgggccuagagggccacagugcgcaggcucauuggaggaucuucccuccggccaccucuccugcaccuccagaccacugucccgaugaugcccaccacaaggccgacucccgcugccacugggacagcccaguagagcaccucgggggcuucuucagccuggucugggagcaaucggcuguuccgcaggguguagagguaagggcucucaggagaggggcacuugaguuuggcucggcugugggugaaguuguuggagguagucuugcggcccacugguuccagcauguuguuccagagugcgauggccaucucggcaugcccgcggucugagaagugaaaacaguccucggagaagaaggugaggucaguguccccucucucguucaguggggugaguguguuuuggaagaaaggcugcaccacaaccgcaaaguccucacgcuguguguauuggugccaguaggagaaacuggagaugccaugcuggagguuccaguucacuuucuucaguucuugcuucuccagggagcuuugcgagugucugaggcaagugcaguuguucugagcugccagcauggcacauuucccgccuuggcccugguacaggcuagccagcuccaugaccuccaccacguugacgaaagcccuugggagcuccucagagaggauguccagggccuguuggaugugcugaacauauuccguggccaagugggccuccggauucucacaguaaugacacaagucguugaccccaaugaagagugugaccagcuuccagucuuucuccagguugaugucggggcuguuuuucauucgcucuaccaggucccaggccugggcuggcaugucccuagcucuggccccuuccgcugccacauuuaguccugcuguccccucccaggugcugguagagaagccaaggagguaaggguugaacuucuucagaauguugggcaguguggugugagucuccaaguucccauccccuccaaugcuccaagagaguccccuccaagauguggguaggucacuggaguuguuuggucgagcucccacugcuguagucagagagucacccagggcggccaccacuuugaugucugcuggucggagcugguggacagagguuggaacacuauuggaagccuuccacucuguacacaggaagucacugccccaguucucaauggcuggcuugaugggguacguguaguuacuauuccgagggguucucaggaagggcucauucugagugggacaggugaugggcaucucugcucucagguccagggucucuguuuugcuuccaagugguucaagcauauugguccaaagggcucuggccagcugggaguggaauuucugauuuggguggaugcagucuggggcaaagaaggacguaucugggagcccauccgccaggacagggagcuggauguucuggaagaagggcugcagcaccacagagaaguccuccugcgugucauagcggccugaccccaccagcucgcgcaugcugcuccgguaggcucggcugaaggccuccagccuggcuagcucuugggaguucucccgcagggucagaacgcaguuacacaaaacgcuggccugcugcacugggcacuugucuggguuucccaggaacaccugccgcaugauagugggguucaggaaguccacgagguugaccaggacucugggcaccucucuaugcaggacguccaaggcauugcggagauggugaacaaaguuggcugcagaauacagauucgaaucugugcaguagucacauaaaucgcugccuccgaucagcacugugaugaccuuccagucuucauggaaauuuacucuaugaucaucuuucaucuucugcaucagaguuuggacuuggcucauaagauccucagccuuugcuccgggaacagcuugauugaggaaugcauucgugucauuggcaucacccgugcccacggcguagccugugagguuucuguuaaacucccgaaggauauuagguaagguggucacauucuccagggagccguccccuccugcacuguaugacaguccccgauacuguguggugacaucggggaggucgucugguuuggagccaauuccauugccagcggucagagaaucccccagagcagccacaacuuggaugucugcaggucucagggcaugcacugagguagggugcaaggcagaaggggcucugucccugcauggcagccaggucccaugacccugcaugcuguucuuguagguccucagaaacggcuggaccugguucggacaugugauauugaucuuguuuucaaacuuaugacgagucgucuucuggccaacaggcuccagcauauuguuccagagagcacuggcugcucgggagugagacuugcugcugaaguggaaacagucaggagcgaagaaagaguugucaggcaauccuuccgaggucuuuggcauguccacguuuucaaagaacggcugcacaaccacaguaaaaucuucccuugugucauaucgcccacucucaaucaguuggugggucuucuccugaaacuucuuguugaauucgaugaggguagcaaguucuguugaguuaucaucaaacuucaggacacagggacacagagaccugaggaucauccuugggcaguagacuuuuuucuccugguacagcucccucagguugacgaucucaagcaccgucaccagguucacaaaugcccgaggaaccucagcauggaggauguccagggccuuuccaauguugucugugaaguucuggggagaauaguggaccagaucauugcagaaaucacagaggucauugccgccuauaaacaggguuauuaucuuccagucuuccugaaaguguauccucgugucauucuucaucagguccaccagccuccuggccuggacagguagauccucagcucggccuccugccacagccugguuuaagaaggcauuaggacugguuucuuucccagugccaacagagaagcccuucagggaaggguugaauucccggaggauguucgccagggugguaacggugccgauguucucaucuccgccgacgcuccaggacaggccucgguacugagucaagacguccaagacguucccagguguggacccggccccauugccugccgugagagagucacccagggcuccaauuacguugaugucagccggcuucagccuaugaacugaggugggaaccguaucggaggggucuuugucaggacaucugauuuccgcuccuucucuuaccucaagcuugucuugggguuucugcagucuggucagguaguugcuguuucuguagcugaacagauaggggcucuccugagagggacacuucauuggccucccguguuuuacacucaauggcucaucuuucucuccugcuggcuccaucauccuauuccagagaugccaggccagcgugguagaauccuggagucggggguccuccgaguguagagaugggguggucucauagaagaaaggcuggaaaaccacggugaaggacuccugcucacuguaccugcuggaggccaggaggcuguuccaggcuuccugauaagaccacugcaucaccaccuuggccagccggguggucuccucugagcaauuacagggcucuggugcagggcugagccaagugccgugauacugacgagagaccucugcaaccucagagagguccaccagguuuacaaaugcucuggggaccuccugcugcagguaguccagcacccccaucagcucauccacgccgcccgccgcaagcccauucuguugagcagaggggcacagguaacacuggcuugcauuacugaagaacacauugaugagcuuccagucaaauugaaagucaaguugcagguucucuuucauguuucucaccaguucuugagccugaauccacaagucuucagcaccaucgugggguaugacucucuuuccaguguggcacacaggcauuggaacagaaggacugaaauaucugaugaugucugaaaggacugucaucacucccaugcacaccugcuguggccuuucaguccagucuugcuucuccagaucgcccgucccugggucuggaggaauuuccagauugccaauggcugccacaaauuuaauaucagaaggcuucagagagugaacugauuuagaaggcauauucacuccuaauuuauuuggguugcaugggaauggagaauucuucagggucucuggccauagcugcccuuccaauguacucuuucuaggagagguauggaucugagggguccccuccagcagccgggugaugaggcuguccacguucagcuccccguccgccaucuugucggcacagacucuccuucccagcagcgggaacaagggcuucucggcggcggaggcugcggcgacggcucggcguucucucaccuacaagucacgcggcguuucgaccccggcuccaacucccccuuuucccgggcccuccccccacccccuccccgccggguagcgagagcgcgcgcacacucggaggcacccacggaaaauaaauaaauaaacaagagaggcccccucgaacagggccgcgucagacccaggccgccaccuccuccuccucggcaccgcccagcuccgcaaagcucaccagcgccgccgacggccccacccgcagcgccacucacuccgcacgucccuugcgcgccgcc

SEQ ID NO: 2199 - RNA, 5195 nt, Homo sapiens
uugugucccaaucauuuuuuauuccuuuucccaaaaugacaugugaagguugcucucccccaagaaacuuuccccgaagaacccuuucuauucuuuaaaacaaucagacacauuuaccuacugaugcccuaguaguuacacaucaucacguggcuucuugguuauugaaggaguuugaccucucugccaggcugcgacaugcacagccuaggaggcaccucagugcuucgcauuguccuggauacaaaacaguugcuuaauagguauguguuggauuggacugaauggcaaccagccagcuccaaaauuccagccaccaccuggugaccagcauuuuuucugccuuugaaauaguggguuuggugacuugaggauaugcucgugguggcaggcaguuugggcucugguuggucguggcuugggcagcccugcuggaggcaggccacaaaaaguggcagcucccacaccugggcugcacaagagauggaaggugagugcuucacgcaggcaaacccaggaauaaaauagcuuuggacuuuauuuaaauguauccauuccaggagcauaggccuggaagaagcccaggccccaagaaguugugacuguccccugggcuuccuauggcaccaggcauugaagcauguccugguggccgggaguggcuggggcagagggcggugaagagaguggcuauagggaguuuagggugaggacccacccccgggccuagagggccacagugcgcaggcucauuggaggaucuucccuccggccaccucuccugcaccuccagaccacugucccgaugaugcccaccacaaggccgacucccgcugccacugggacagcccaguagagcaccucgggggcuucuucagccuggucugggagcaaucggcuguuccgcaggguguagagguaagggcucucaggagaggggcacuugaguuuggcucggcugugggugaaguuguuggagguagucuugcggcccacugguuccagcauguuguuccagagugcgauggccaucucggcaugcccgcggucugagaagugaaaacaguccucggagaagaaggugaggucaguguccccucucucguucaguggggugaguguguuuuggaagaaaggcugcaccacaaccgcaaaguccucacgcuguguguauuggugccaguaggagaaacuggagaugccaugcuggagguuccaguucacuuucuucaguucuugcuucuccagggagcuuugcgagugucugaggcaagugcaguuguucugagcugccagcauggcacauuucccgccuuggcccugguacaggcuagccagcuccaugaccuccaccacguugacgaaagcccuugggagcuccucagagaggauguccagggccuguuggaugugcugaacauauuccguggccaagugggccuccggauucucacaguaaugacacaagucguugaccccaaugaagagugugaccagcuuccagucuuucuccagguugaugucggggcuguuuuucauucgcucuaccaggucccaggccugggcuggcaugucccuagcucuggccccuuccgcugccacauuuaguccugcuguccccucccaggugcugguagagaagccaaggagguaaggguugaacuucuucagaauguugggcaguguggugugagucuccaaguucccauccccuccaaugcuccaagagaguccccuccaagauguggguaggucacuggaguuguuuggucgagcucccacugcuguagucagagagucacccagggcggccaccacuuugaugucugcuggucggagcugguggacagagguuggaacacuauuggaagccuuccacucuguacacaggaagucacugccccaguucucaauggcuggcuugaugggguacguguaguuacuauuccgagggguucucaggaagggcucauucugagugggacaggugaugggcaucucugcucucagguccagggucucuguuuugcuuccaagugguucaagcauauugguccaaagggcucuggccagcugggaguggaauuucugauuuggguggaugcagucuggggcaaagaaggacguaucugggagcccauccgccaggacagggagcuggauguucuggaagaagggcugcagcaccacagagaaguccuccugcgugucauagcggccugaccccaccagcucgcgcaugcugcuccgguaggcucggcugaaggccuccagccuggcuagcucuugggaguucucccgcagggucagaacgcaguuacacaaaacgcuggccugcugcacugggcacuugucuggguuucccaggaacaccugccgcaugauagugggguucaggaaguccacgagguugaccaggacucugggcaccucucuaugcaggacguccaaggcauugcggagauggugaacaaaguuggcugcagaauacagauucgaaucugugcaguagucacauaaaucgcugccuccgaucagcacugugaugaccuuccagucuucauggaaauuuacucuaugaucaucuuucaucuucugcaucagaguuuggacuuggcucauaagauccucagccuuugcuccgggaacagcuugauugaggaaugcauucgugucauuggcaucacccgugcccacggcguagccugugagguuucuguuaaacucccgaaggauauuagguaagguggucacauucuccagggagccguccccuccugcacuguaugacaguccccgauacuguguggugacaucggggaggucgucugguuuggagccaauuccauugccagcggucagagaaucccccagagcagccacaacuuggaugucugcaggucucagggcaugcacugagguagggugcaaggcagaaggggcucugucccugcauggcagccaggucccaugacccugcaugcuguucuuguagguccucagaaacggcuggaccugguucggacaugugauauugaucuuguuuucaaacuuaugacgagucgucuucuggccaacaggcuccagcauauuguuccagagagcacuggcugcucgggagugagacuugcugcugaaguggaaacagucaggagcgaagaaagaguugucaggcaauccuuccgaggucuuuggcauguccacguuuucaaagaacggcugcacaaccacaguaaaaucuucccuugugucauaucgcccacucucaaucaguuggugggucuucuccugaaacuucuuguugaauucgaugaggguagcaaguucuguugaguuaucaucaaacuucaggacacagggacacagagaccugaggaucauccuugggcaguagacuuuuuucuccugguacagcucccucagguugacgaucucaagcaccgucaccagguucacaaaugcccgaggaaccucagcauggaggauguccagggccuuuccaauguugucugugaaguucuggggagaauaguggaccagaucauugcagaaaucacagaggucauugccgccuauaaacaggguuauuaucuuccagucuuccugaaaguguauccucgugucauucuucaucagguccaccagccuccuggccuggacagguagauccucagcucggccuccugccacagccugguuuaagaaggcauuaggacugguuucuuucccagugccaacagagaagcccuucagggaaggguugaauucccggaggauguucgccagggugguaacggugccgauguucucaucuccgccgacgcuccaggacaggccucgguacugagucaagacguccaagacguucccagguguggacccggccccauugccugccgugagagagucacccagggcuccaauuacguugaugucagccggcuucagccuaugaacugaggugggaaccguaucggaggggucuuugucaggacaucugauuuccgcuccuucucuuaccucaagcuugucuugggguuucugcagucuggucagguaguugcuguuucuguagcugaacagauaggggcucuccugagagggacacuucauuggccucccguguuuuacacucaauggcucaucuuucucuccugcuggcuccaucauccuauuccagagaugccaggccagcgugguagaauccuggagucggggguccuccgaguguagagaugggguggucucauagaagaaaggcuggaaaaccacggugaaggacuccugcucacuguaccugcuggaggccaggaggcuguuccaggcuuccugauaagaccacugcaucaccaccuuggccagccggguggucuccucugagcaauuacagggcucuggugcagggcugagccaagugccgugauacugacgagagaccucugcaaccucagagagguccaccagguuuacaaaugcucuggggaccuccugcugcagguaguccagcacccccaucagcucauccacgccgcccgccgcaagcccauucuguugagcagaggggcacagguaacacuggcuugcauuacugaagaacacauugaugagcuuccagucaaauugaaagucaaguugcagguucucuuucauguuucucaccaguucuugagccugaauccacaagucuucagcaccaucgugggguaugacucucuuuccaguguggcacacaggcauuggaacagaaggacugaaauaucugaugaugucugaaaggaccuccagcagccgggugaugaggcuguccacguucagcuccccguccgccaucuugucggcacagacucuccuucccagcagcgggaacaagggcuucucggcggcggaggcugcggcgacggcucggcguucucucaccuacaagucacgcggcguuucgaccccggcuccaacucccccuuuucccgggcccuccccccacccccuccccgccggguagcgagagcgcgcgcacacucggaggcacccacggaaaauaaauaaauaaacaagagaggcccccucgaacagggccgcgucagacccaggccgccaccuccuccuccucggcaccgcccagcuccgcaaagcucaccagcgccgccgacggccccacccgcagcgccacucacuccgcacgucccuugcgcgccgcc

SEQ ID NO: 2200 - RNA, 3290 nt, Homo sapiens
uugguaaguaaauuuuauuuugauccuuugaauggucccaaacaagcgaacuuauuucaauggaagaaaaggcaaugcucucaagaccuuggggcccagcacauuguuaagcuggccaaagcuggaaccguucacuacagaaucucacaggucaaggggccuuggaaauauucacagccgagccucuucugcagguccuguucacagccacccaccccccaugaauucugggucuacuucuccccuaauuccaugagauccacucuuuucacuuuguuucccagggggaagaggcucaaauugcauucugaauugaucuaguaucauuaauugccuaguuuguccaaucuagaagcuuuaacggcucaaaaauugcuuuucucagauaagucuacuacgugaacacuuucaggagguguuaacagguguuaugaacaaagaaaauguucuggaauuaagggaaacauuggguuaaacagauaaaacuuaaauagauuucugcauugcaggccuuaugagagccuuuaauaugcuaauacacacaugaauuccccaaaggaagguuaugguaauguuucccccucagauacaaaggauuuucucuucuccaggaacaggucuggaguuaauguuccauggaacacacuuugagacacaguagucuauguauucuaccaagugucaagcugucucucagaccccgaccuagagcuuccaucuuuaacacacgugcauuugggggcagcuauuugaaacauuuaggacaaaugaaggguuuaaagggacagcagccauugaaccugaggccuuagagcuagaacuaaaagauugagacauuaggcuguaauggacuucacuuguuggaagaaacagagcaauggcugaauuuucccaucgcugcagaaagaaacuuuuaguagaggacugcugguucauaucugaaucccaggagcccagcuggucgaucuguuuuaaaguagggcacaucaccucacuuccccaggcugccccaccaggugcacgucgcguaucuaucaccugcaaugugguucgucugcuugauuuuuguuucccaugcuaucguaugaggucauugccuucuuuagcugagaccaagugcagcugccagaaccucaugcucuuuccugauuguaauaagcucugcuuucucuccucugguuuuuuuucuuguagccucauuaggagcagaauggugagucagugaggcucugauuuguuccauggcagccuguuaggaccagguaccugaccaaggacuuguggaaacgcagggaccuuggcgcaggaaggcacugaccucuguucuugagagguugauguccucaugcuaaggacaaccuagguccucguugugggugguacaggccgagugauggcgccucccucucgcccuggaaacccauccucucugggacucugcucaggucuggccagagaaccuucacagucuugaucacccccucccugcucccugucacuuccccaggaagcaaacugacucagaagaaaagggaggcggcagcaaaggugcuguccuggcuccgccacucauuagcacgcugcccccuuguggccagcuucguucuaguuguuuucccagguaaauucugagcuacucgccacuuacuuugaagccuacaggaaugagaacuuuauuaggagagaaagaaacuugagaauaucuacacgcaaccgcucgccugacacacccugagcuucuccacuuccguguucgggaugcccuuucucacccuuuccucuugucgaauugcuaaucuuucaagacauggcugauugugauugugucuugguuauggccucucgaagugugcgauggguuucagagguuuucugugcagauguguacauauauguaaaggcagcugugugacuacaagacaacaugaauaaacacauaaagacaguaaacagagacguaggaacaccacguguacacguauacaugcaagcggggaggugaagauucagggauuuggugcuuuucuggugcauuuccuguuggauuugcugacccaggagucugauaagaacccugguuuacuuucucuguaugacaguccccgauacuguguggugacaucggggaggucgucugguuuggagccaauuccauugccagcggucagagaaucccccagagcagccacaacuuggaugucugcaggucucagggcaugcacugagguagggugcaaggcagaaggggcucugucccugcauggcagccaggucccaugacccugcaugcuguucuuguagguccucagaaacggcuggaccugguucggacaugugauauugaucuuguuuucaaacuuaugacgagucgucuucuggccaacaggcuccagcauauuguuccagagagcacuggcugcucgggagugagacuugcugcugaaguggaaacagucaggagcgaagaaagaguugucaggcaauccuuccgaggucuuuggcauguccacguuuucaaagaacggcugcacaaccacaguaaaaucuucccuugugucauaucgcccacucucaaucaguuggugggucuucuccugaaacuucuuguugaauucgaugaggguagcaaguucuguugaguuaucaucaaacuucaggacacagggacacagagaccugaggaucauccuugggcaguagacuuuuuucuccugguacagcucccucagguugacgaucucaagcaccgucaccagguucacaaaugcccgaggaaccucagcauggaggauguccagggccuuuccaauguugucugugaaguucuggggagaauaguggaccagaucauugcagaaaucacagaggucauugccgccuauaaacaggguuauuaucuuccagucuuccugaaaguguauccucgugucauucuucaucagguccaccagccuccuggccuggacagguagauccucagcucggccuccugccacagccugguuuaagaaggcauuaggacugguuucuuucccagugccaacagagaagcccuucagggaaggguugaauucccggaggaugucacaaauuuucagcggugcuuccaauuccaaaagaauaggcuggcugagaaagaucucccgagacuugauacauaagccucgaacuucugcuucagucaucugcacaaucuuuccuggacgacauccucguacagcgccgccgacggccccacccgcagcgccacucacuccgcacgucccuugcgcgccgccgcgucacgcagc

SEQ ID NO: 2201 - RNA, 3287 nt, Homo sapiens
uugugucccaaucauuuuuuauuccuuuucccaaaaugacaugugaagguugcucucccccaagaaacuuuccccgaagaacccuuucuauucuuuaaaacaaucagacacauuuaccuacugaugcccuaguaguuacacaucaucacguggcuucuugguuauugaaggaguuugaccucucugccaggcugcgacaugcacagccuaggaggcaccucagugcuucgcauuguccuggauacaaaacaguugcuuaauagguauguguuggauuggacugaauggcaaccagccagcuccaaaauuccagccaccaccuggugaccagcauuuuuucugccuuugaaauaguggguuuggugacuugaggauaugcucgugguggcaggcaguuugggcucugguuggucguggcuugggcagcccugcuggaggcaggccacaaaaaguggcagcucccacaccugggcugcacaagagauggaaggugagugcuucacgcaggcaaacccaggaauaaaauagcuuuggacuuuauuuaaauguauccauuccaggagcauaggccuggaagaagcccaggccccaagaaguugugacuguccccugggcuuccuauggcaccaggcauugaagcauguccugguggccgggaguggcuggggcagagggcggugaagagaguggcuauagggaguuuagggugaggacccacccccgggccuagagggccacagugcgcaggcucauuggaggaucuucccuccggccaccucuccugcaccuccagaccacugucccgaugaugcccaccacaaggccgacucccgcugccacugggacagcccaguagagcaccucgggggcuucuucagccuggucugggagcaaucggcuguuccgcaggguguagagguaagggcucucaggagaggggcacuugaguuuggcucggcugugggugaaguuguuggagguagucuugcggcccacugguuccagcauguuguuccagagugcgauggccaucucggcaugcccgcggucugagaagugaaaacaguccucggagaagaaggugaggucaguguccccucucucguucaguggggugaguguguuuuggaagaaaggcugcaccacaaccgcaaaguccucacgcuguguguauuggugccaguaggagaaacuggagaugccaugcuggagguuccaguucacuuucuucaguucuugcuucuccagggagcuuugcgagugucugaggcaagugcaguuguucugagcugccagcauggcacauuucccgccuuggcccugguacaggcuagccagcuccaugaccuccaccacguugacgaaagcccuugggagcuccucagagaggauguccagggccuguuggaugugcugaacauauuccguggccaagugggccuccggauucucacaguaaugacacaagucguugaccccaaugaagagugugaccagcuuccagucuuucuccagguugaugucggggcuguuuuucauucgcucuaccaggucccaggccugggcuggcaugucccuagcucuggccccuuccgcugccacauuuaguccugcuguccccucccaggugcugguagagaagccaaggagguaaggguugaacuucuucagaauguugggcaguguggugugagucuccaaguucccauccccuccaaugcuccaagagaguccccuccaagauguggguaggucacuggaguuguuuggucgagcucccacugcuguagucagagagucacccagggcggccaccacuuugaugucugcuggucggagcugguggacagagguuggaacacuauuggaagccuuccacucuguacacaggaagucacugccccaguucucaauggcuggcuugaugggguacguguaguuacuauuccgagggguucucaggaagggcucauucugagugggacaggugaugggcaucucugcucucagguccagggucucuguuuugcuuccaagugguucaagcauauugguccaaagggcucuggccagcugggaguggaauuucugauuuggguggaugcagucuggggcaaagaaggacguaucugggagcccauccgccaggacagggagcuggauguucuggaagaagggcugcagcaccacagagaaguccuccugcgugucauagcggccugaccccaccagcucgcgcaugcugcuccgguaggcucggcugaaggccuccagccuggcuagcucuugggaguucucccgcagggucagaacgcaguuacacaaaacgcuggccugcugcacugggcacuugucuggguuucccaggaacaccugccgcaugauagugggguucaggaaguccacgagguugaccaggacucugggcaccucucuaugcaggacguccaaggcauugcggagauggugaacaaaguuggcugcagaauacagauucgaaucugugcaguagucacauaaaucgcugccuccgaucagcacugugaugaccuuccagucuucauggaaauuuacucuaugaucaucuuucaucuucugcaucagaguuuggacuuggcucauaagauccucagccuuugcuccgggaacagcuugauugaggaaugcauucgugucauuggcaucacccgugcccacggcguagccugugagguuucuguuaaacucccgaaggauaucacaaauuuucagcggugcuuccaauuccaaaagaauaggcuggcugagaaagaucucccgagacuugauacauaagccucgaacuucugcuucagucaucugcacaaucuuuccuggacgacauccucguaccuccagcagccgggugaugaggcuguccacguucagcuccccguccgccaucuugucggcacagacucuccuucccagcagcgggaacaagggcuucucggcggcggaggcugcggcgacggcucggcguucucucaccuacaagucacgcggcguuucgaccccggcuccaacucccccuuuucccgggcccuccccccacccccuccccgccggguagcgagagcgcgcgcacacucggaggcacccacggaaaauaaauaaauaaacaagagaggcccccucgaacagggccgcgucagacccaggccgccaccuccuccuccucggcaccgcccagcuccgcaaagcucaccagcgccgccgacggccccacccgcagcgccacucacuccgcacgucccuugcgcgccgcc

SEQ ID NO: 2202 - RNA, 5162 nt, Homo sapiens
uugugucccaaucauuuuuuauuccuuuucccaaaaugacaugugaagguugcucucccccaagaaacuuuccccgaagaacccuuucuauucuuuaaaacaaucagacacauuuaccuacugaugcccuaguaguuacacaucaucacguggcuucuugguuauugaaggaguuugaccucucugccaggcugcgacaugcacagccuaggaggcaccucagugcuucgcauuguccuggauacaaaacaguugcuuaauagguauguguuggauuggacugaauggcaaccagccagcuccaaaauuccagccaccaccuggugaccagcauuuuuucugccuuugaaauaguggguuuggugacuugaggauaugcucgugguggcaggcaguuugggcucugguuggucguggcuugggcagcccugcuggaggcaggccacaaaaaguggcagcucccacaccugggcugcacaagagauggaaggugagugcuucacgcaggcaaacccaggaauaaaauagcuuuggacuuuauuuaaauguauccauuccaggagcauaggccuggaagaagcccaggccccaagaaguugugacuguccccugggcuuccuauggcaccaggcauugaagcauguccugguggccgggaguggcuggggcagagggcggugaagagaguggcuauagggaguuuagggugaggacccacccccgggccuagagggccacagugcgcaggcucauuggaggaucuucccuccggccaccucuccugcaccuccagaccacugucccgaugaugcccaccacaaggccgacucccgcugccacugggacagcccaguagagcaccucgggggcuucuucagccuggucugggagcaaucggcuguuccgcaggguguagagguaagggcucucaggagaggggcacuugaguuuggcucggcugugggugaaguuguuggagguagucuugcggcccacugguuccagcauguuguuccagagugcgauggccaucucggcaugcccgcggucugagaagugaaaacaguccucggagaagaaggugaggucaguguccccucucucguucaguggggugaguguguuuuggaagaaaggcugcaccacaaccgcaaaguccucacgcuguguguauuggugccaguaggagaaacuggagaugccaugcuggagguuccaguucacuuucuucaguucuugcuucuccagggagcuuugcgagugucugaggcaagugcaguuguucugagcugccagcauggcacauuucccgccuuggcccugguacaggcuagccagcuccaugaccuccaccacguugacgaaagcccuugggagcuccucagagaggauguccagggccuguuggaugugcugaacauauuccguggccaagugggccuccggauucucacaguaaugacacaagucguugaccccaaugaagagugugaccagcuuccagucuuucuccagguugaugucggggcuguuuuucauucgcucuaccaggucccaggccugggcuggcaugucccuagcucuggccccuuccgcugccacauuuaguccugcuguccccucccaggugcugguagagaagccaaggagguaaggguugaacuucuucagaauguugggcaguguggugugagucuccaaguucccauccccuccaaugcuccaagagaguccccuccaagauguggguaggucacuggaguuguuuggucgagcucccacugcuguagucagagagucacccagggcggccaccacuuugaugucugcuggucggagcugguggacagagguuggaacacuauuggaagccuuccacucuguacacaggaagucacugccccaguucucaauggcuggcuugaugggguacguguaguuacuauuccgagggguucucaggaagggcucauucugagugggacaggugaugggcaucucugcucucagguccagggucucuguuuugcuuccaagugguucaagcauauugguccaaagggcucuggccagcugggaguggaauuucugauuuggguggaugcagucuggggcaaagaaggacguaucugggagcccauccgccaggacagggagcuggauguucuggaagaagggcugcagcaccacagagaaguccuccugcgugucauagcggccugaccccaccagcucgcgcaugcugcuccgguaggcucggcugaaggccuccagccuggcuagcucuugggaguucucccgcagggucagaacgcaguuacacaaaacgcuggccugcugcacugggcacuugucuggguuucccaggaacaccugccgcaugauagugggguucaggaaguccacgagguugaccaggacucugggcaccucucuaugcaggacguccaaggcauugcggagauggugaacaaaguuggcugcagaauacagauucgaaucugugcaguagucacauaaaucgcugccuccgaucagcacugugaugaccuuccagucuucauggaaauuuacucuaugaucaucuuucaucuucugcaucagaguuuggacuuggcucauaagauccucagccuuugcuccgggaacagcuugauugaggaaugcauucgugucauuggcaucacccgugcccacggcguagccugugagguuucuguuaaacucccgaaggauauuagguaagguggucacauucuccagggagccguccccuccugcacuguaugacaguccccgauacuguguggugacaucggggaggucgucugguuuggagccaauuccauugccagcggucagagaaucccccagagcagccacaacuuggaugucugcaggucucagggcaugcacugagguagggugcaaggcagaaggggcucugucccugcauggcagccaggucccaugacccugcaugcuguucuuguagguccucagaaacggcuggaccugguucggacaugugauauugaucuuguuuucaaacuuaugacgagucgucuucuggccaacaggcuccagcauauuguuccagagagcacuggcugcucgggagugagacuugcugcugaaguggaaacagucaggagcgaagaaagaguugucaggcaauccuuccgaggucuuuggcauguccacguuuucaaagaacggcugcacaaccacaguaaaaucuucccuugugucauaucgcccacucucaaucaguuggugggucuucuccugaaacuucuuguugaauucgaugaggguagcaaguucuguugaguuaucaucaaacuucaggacacagggacacagagaccugaggaucauccuugggcaguagacuuuuuucuccugguacagcucccucagguugacgaucucaagcaccgucaccagguucacaaaugcccgaggaaccagaucauugcagaaaucacagaggucauugccgccuauaaacaggguuauuaucuuccagucuuccugaaaguguauccucgugucauucuucaucagguccaccagccuccuggccuggacagguagauccucagcucggccuccugccacagccugguuuaagaaggcauuaggacugguuucuuucccagugccaacagagaagcccuucagggaaggguugaauucccggaggauguucgccagggugguaacggugccgauguucucaucuccgccgacgcuccaggacaggccucgguacugagucaagacguccaagacguucccagguguggacccggccccauugccugccgugagagagucacccagggcuccaauuacguugaugucagccggcuucagccuaugaacugaggugggaaccguaucggaggggucuuugucaggacaucugauuuccgcuccuucucuuaccucaagcuugucuugggguuucugcagucuggucagguaguugcuguuucuguagcugaacagauaggggcucuccugagagggacacuucauuggccucccguguuuuacacucaauggcucaucuuucucuccugcuggcuccaucauccuauuccagagaugccaggccagcgugguagaauccuggagucggggguccuccgaguguagagaugggguggucucauagaagaaaggcuggaaaaccacggugaaggacuccugcucacuguaccugcuggaggccaggaggcuguuccaggcuuccugauaagaccacugcaucaccaccuuggccagccggguggucuccucugagcaauuacagggcucuggugcagggcugagccaagugccgugauacugacgagagaccucugcaaccucagagagguccaccagguuuacaaaugcucuggggaccuccugcugcagguaguccagcacccccaucagcucauccacgccgcccgccgcaagcccauucugugagaggagaaccgugcuaagugagggugccuguugagcagaggggcacagguaacacuggcuugcauuacugaagaacacauugaugagcuuccagucaaauugaaagucaaguugcagguucucuuucauguuucucaccaguucuugagccugaauccacaagucuucagcaccaucgugggguaugacucucuuuccaguguggcacacaggcauuggaacagaaggacugaaauaucugaugaugucugaaaggaccuccagcagccgggugaugaggcuguccacguucagcuccccguccgccaucuugucggcacagacucuccuucccagcagcgggaacaagggcuucucggcggcggaggcugcggcgacggcucggcguucucucaccuacaagucacgcggcguuucgaccccggcuccaacucccccuuuucccgggcccuccccccacccccuccccgccggguagcgagagcgcgcgcacacucggaggcacccacggaaaauaaauaaauaaacaagagaggcccccucgaacagggccgcgucagacccaggccgccaccuccuccuccucggcaccgcccagcuccgcaaagcucaccagcgccgccgacggccccacccgcagcgccacucacuccgcacgucccuugcgcgccgcc

SEQ ID NO: 2203-2204 - skipped (2 entries)

SEQ ID NO: 2205 - RNA, 2147 nt, Homo sapiens
aggggcaguaggcggcccucggguccggcgucugccuugcguccccguccggcuuuccgccggcgacacaggaucuuuggccuaucagugcgccgcaaggcguacuuggggugacccucaggcccgggggggccgugcggugagcacaaguccaggcgcaagggcucggccagugggcagugccccaggggcugcuggggcuccagacggcgaccugggacgucaagcagcuugggcagggggucgagugccugggggucaagcagcugcgacuccaaggagucaggcaggguguccagggccuggagagccaggcccggcagccccagaggaucagcaagagguugcagggguggcagcuccagagcuuccccgagcggcucuagugccugcggguccaggaagcggggcuggggguccaggagcugaggcuccggcucgggcgaugguggcucgagggccugggccucuagcagcugggccucugggcaagugagggaggccagcucacuaaggaugucggcgucagcaaguucugaguaaucagugcugucuggcucaggcucugggggcagacccguggccgcagccguggcuccgggacuauggccuuggccaggcuggggacugucccuaggcucaggcucaggcucguagaggggauggcugggccgcuccgacuuggcgugugggguggcccgcuccucagggcuacggaugcuguuggccaaacugggugaggagaagaagcuguacuguaggucgccggguggcggugcaggcgggcggcucagucggagcccaccacaguccagguguacaccacugugcugcagguccugggagaggcgugucagguccuucaugaugucaaucagcugcaccacuggucgcagguucacccgcccguugucccagcagcgucgggagcugcugccgucuccgaccgguguggggcagcgggccugugagacaggacggguuggguucccggagguagucaggagagcugcacacggcacuggaagucaccaccaggcccuggggcuucacacgcauccugaccuuguccuccgcaggccgccgggcggggccggggcugacaugagggugcgagaagccgggaccaggacccucggcucugccgccugggcugucacacuggagaucucuggaagagagagggcccccgugccugggggcucugccagucgcuggcugucagcugggggugcuguggagcaacuucggccugagcccaggccucggggcguggacagcgccuggaaaggaccaucgcagcucagguuuagugagcaccuacugcgcgccagguacugggcuggaagcuguccaggcaucguuucauuuaauucuucauaccaauccuuggccucccaguucucugcuuccacagacuccgguagagagguguccugggggggucagcagcugcacacaucaggcacucugguuuccaccucugcccugaguccuggucauugucacaaccccuuucuccucccaguucucucaggucaucaaggcgcagggaagaguccucaggcuaggagguaggacucacuguauauccaugagccucaguuccccuuucugagcaggcugcgaagauaggcugggcucagcaggaaaggccugucuucaucagcaucuccaggguggucucugcaacggccugagcgucgccccgcacucggggcccucugcacacgcucaacugggugggcucugggguccaggccgauggguugacaaucaggcaagcucccauucaggcugcccagcugucggaugacauuugccagggugauguuggucacgcauuccagcucgcuucuaacgcuaggcaacgucugacggcacaggugccuuggcucgauguuccucguuacuaacggcaugguggaccugcuucaggcaauguucugaauggugaaaaacaaccuggccucccgcagucgccgucagcgacaggaagggucggccggccgcccagucuccgcacagagugugcucccgcggaccgccucgcgggcugccaaacggccggacccccucagcgcgcuacgcccccagccgcgcucgcccugccuguguccgccauuacgcgauuccccgcccugggc

SEQ ID NO: 2206 - RNA, 5612 nt, Homo sapiens
ccaggaacaaaaccucgcgguccagucggcacuucaguuggcacuacagggaugugacggugaauguguccucggggugagguuccgccaugggccccaggaagccgcucuuggggcccccacccaggccaggaugcgccuggggcauaaagccuggguaccuguaggcgguguccugcaggggcagcagcgagucccucggcacgggggacagggucaagucacuaaggagugggcagccauagccagcagcggcugcagcagggccacggggugggccagggggccgggccauuuccaguggcuccuugucggccuugggcguggcuggugggcuagccaggugaggggcacugaggcacgcggccuccguccugcccaggaagucagccagcagcccuguacccaccuugccuucauagggcgggcugcgggcagcugagccuggaggguaccaauaggcugugcccuugcagcugggggaaucguaguggggcuggcccagcggcaggucccggcagcucaggugggccugggcugcagcugcguggcccaggcuggcccccuggaguccaugcuugaggggcucgcaggcagccagcuuugugggcgguggccgcagcucuuccuugaagcccaguguaggcgagcaggugggcgaguaugccuucugcaggccggcgucaaacaccgugggugggugggccagcggugggaaaugcuugccaucaagcucgggagcacccaggcugggcgagucgcaguggaagccuuggccaaaggugccaucggaaggcguggacggguucauggaguaggguccuaugaagucacaggggucucgcucucccacgccgaaggcccucgacugugagggcaguggugacaugcugcuguccccgcuauaguaguccaggccgaggucaggacuguccuggaacaguggguugacuggcuguggcuuggggaugaacuuggcuuuggccgcugcgccaccccgcuccuucuuggcugagcaggccccaccgccccguccaccucgcggcugccggggcccagugcuccguuuggauggguagccugaggcagcggcagaggcggaugucgggaagcccagaugugaggccucgaacagguccaccuucuuccgccguccacggcccggcuuggagcuacucugaaagaggacacucugguuccaguuguagccgggggcagaugaugccucguuccaguccaucaucaguuucuccaggcuggacaggcucgacuggcccucacuacuugaggccucgcuguuggcacgccgaaaccccccgccaccaaccggcugauugaacugggugcugucggaggaugacucagagaaggucuccgacacagccgucugcugcuucaccuucugcgguguguaguuggagauguccaggaucacguugggcucgcugacguggcagucaaaacugggauuguagagcugacuaaaggccucugaggcccaguccaggccuccauagcccugccggaaaggccacugagaagcccccgcaaacugccgacaguucucgggcgagggcuggaaggaggaggaggaggaggaggcggcagaggcugcagagguggcagaggcuguggugcccuuggguaccauguagccaccgggcgagacugugcuggcccggcugucacagcgcaggggcgugggggcugaaccagagaagggggcccccucagagcugcugaagaaggaggccuugcuugguggcaggcaggggcccccgguaggcgguggggcauagccggcgcugugggcgcugcugggugaggcagggaggcuguugccacugccauaggcgaagcugcaguccuugcuguuagcgcaguccuggccuguaaagggcuuaguuggggcgaauacgcuuuguccggccccauagccgccguacuggggcagguagguguuggcaggcgggugggugguaggugagcgggccauggcugagggcgggggcaccagcuuggggaaggucucggcugcccggcagucugaagcggcuggaguuagcccauagcuugcugcucguccuggugggaaggucuggcgcgcggacaggacaggcugaaaggagggguccgccccagccccgcugcuacccacugccacugggcuggccuuggcuccccggcuagggaagguggccaggccccgcugggcaggcagggcacugguggguggcccugcauaggugcccgaugccuuccgggacucugggcgagaggcugagagggcaaaguccaagagaucggaggagucauccgaaucgagcagcgagcgaaaguagccggugaagagguuuuggcgcuccuggcugagcucggucuggccugagggugcacccgugcuguaguagcugccacggccugaggcuccacucuccagcccaguggaggcaaaggcccgggccucgguccccugaaacccacaguuucggccagcuuguccgccugggugcccauggugaggggcccagccaccacccuuauccccggcccacucagcaccugccuccccaaagccugggccacugggcaccugcucugggaacagagucccauucuuccgggaccgucucuugcgcuuuggcuucccagucacagcgucuaccuccccccggccccguuugcgugggugccccaacucaguaaggcccgggcccccgaccccagcggcugccacggccaccaccuucuuuuucuugccgaugcccucaaagaagucacugaaggagcaucgggcugacuuggccgcauggcccccaccccggccaccaaaaccgccugcuuugcccccacgccgccggaagcccugcacacgaugcaggaagugggagaugcucugggugucgggggccuggugcaccgacuccggcucacuggguguccagcagcggggcggugagcaccguccagcgcacuggcucuggcgguucaggaaggccagcuuggccaggacgucugaguacucggccuugcugucguuggcgucugcugcauaggauggcuggggagaugccagcuucugcuuccgccgccgucguuuuuuuaccucuggcauggccaugguggccgcugccacaguggcugccucggccgccaccacagcuggcuccuugggcuugccgggacccagcagcagguucuuaggagggcggccgcgcuuacguuugagaauaaugggcaucucaccgggugggaagaccacuaccacguuccgcccauuguucuucaucuucagcagcggggugggcucagccgacacgcgcaggcccagcuccuugcccuccacgcucaggcugcugcucaaggaagacacuuuguauguggucuuguuccgccgccccagcgauacggggaucuuggccaucuucaccaccaugcgccgcacgccccggcacuugccuuugcggguagagaccacuggggucugggaagauuccggcuucaacucugggacugagaccgggccugggccuggcagggcaggggguggaggaggcgguggugguggggguucggccagggcagccaccagccccgugggcauaggcaggggcaguaggcggcccucggguccggcgucugccuugcguccccguccggcuuuccgccggcgacacaggaucuuuggccuaucagugcgccgcaaggcguacuuggggugacccucaggcccgggggggccgugcggugagcacaaguccaggcgcaagggcucggccagugggcagugccccaggggcugcuggggcuccagacggcgaccugggacgucaagcagcuugggcagggggucgagugccugggggucaagcagcugcgacuccaaggagucaggcaggguguccagggccuggagagccaggcccggcagccccagaggaucagcaagagguugcagggguggcagcuccagagcuuccccgagcggcucuagugccugcggguccaggaagcggggcuggggguccaggagcugaggcuccggcucgggcgaugguggcucgagggccugggccucuagcagcugggccucugggcaagugagggaggccagcucacuaaggaugucggcgucagcaaguucugaguaaucagugcugucuggcucaggcucugggggcagacccguggccgcagccguggcuccgggacuauggccuuggccaggcuggggacugucccuaggcucaggcucaggcucguagaggggauggcugggccgcuccgacuuggcgugugggguggcccgcuccucagggcuacggaugcuguuggccaaacugggugaggagaagaagcuguacuguaggucgccggguggcggugcaggcgggcggcucagucggagcccaccacaguccagguguacaccacugugcugcagguccugggagaggcgugucagguccuucaugaugucaaucagcugcaccacuggucgcagguucacccgcccguugucccagcagcgucgggagcugcugccgucuccgaccgguguggggcagcgggccugugagacaggacgggcugcccgugggggcagcgggucgucccccuuggcaaggacuggugggcgccgggugcuggggucccggcgugggggugggcguggguucucggagaaggcguggguggagaaggccuugucaggugggcuggcagggggccgggugggaagcaggggccggggggugggggggccgccgggguaguacuuggguucccggagguagucaggagagcugcacacggcacuggaagucaccaccaggcccuggggcuucacacgcauccugaccuuguccuccgcaggccgccgggcggggccggggcugacaugagggugcgagaagccgggaccaggacccucggcucugccgccugggcugucacacuggagaucucuggaagagagagggcccccgugccugggggcucugccagucgcuggcugucagcugggggugcuguggagcaacuucggccugagcccaggccucggggcguggacagcgccugagcaggcugcgaagauaggcugggcucagcaggaaaggccugucuucaucagcaucuccaggguggucucugcaacggccugagcgucgccccgcacucggggcccucugcacacgcucaacugggugggcucugggguccaggccgauggguugacaaucaggcaagcucccauucaggcugcccagcugucggaugacauuugccagggugauguuggucacgcauuccagcucgcuucuaacgcuaggcaacgucugacggcacaggugccuuggcucgauguuccucguuacuaacggcaugguggaccugcuucaggcaauguucugaauggugaaaaacaaccuggccucccgcagucgccgucagcgacaggaagggucggccggccgcccagucuccgcacagagugugcucccgcggaccgccucgcgggcugccaaacggccggacccccucagcgcgcuacgcccccagccgcgcucgcccugccuguguccgccauuacgcgauuccccgcccugggc

SEQ ID NO: 2207 - RNA, 3186 nt, Homo sapiens
uuaaggaggcaaacauacuuuauuuugacuaauuuguuaguaaguuuauucuucacucauaaaaagaacauauuuuuggcuuugaaaucaugacauaaaauaaaaagggaaauaacugaaaauuaucagcuaaaaguagguagaugcagcucaugcugaaucaucagcaaauacuacgugcuuugggcuauagcagggcaccaaucaaagcaagaaccaaggaugcagugccacgccaucucugaaaacuguuuaguucccaaagguuguuugguccucacauacaggcaauuaauccuuccuuucuccugcuuuccuuccuuccuucuuaacuuuuagcuaugagaacagugggcaauaaugcuuuuauacuagucuuucuaguuuauaggauaguguuguuguuguuuuaacauguauaaccugcauauuuucaaccuucaaaaaauaaaacugccaaaaucaacuguaacuaaaggccauuuuuauuuuuggucuguuaucugcuguaggcagagcuucauauaggaauuuuuauugcgaauuucuaugacugcaucccuaacaagcucaaugaacaucuguggccaaagcuucugcaaagccucauuuuucauguugauuucuguggcuuccuucacaaggucuucuauauauguuuuacagaauuucuucuuuuccuuuauuuccucuagcuuuucauuauaaaagucucuuguaguauaauuuaauguagcacgauuuguguuuucuccuacaagucuuuugcugucauuauuuucuucguugauaauaccagguuuuuuuccuuuggauucuaguagauaccgaaauugcuuuuuccuggcaucacccagaauggaaaucagacgauacugggguaacucagaagaugcuacaugugcuaggauuccaaagagccuuucagccauuaucauaucauucugugucaccucuguuccauuuauuuucugcauacugaaauggcuuagccuaaacaguacauaguauuuccagaguguaaaauugacaacuggauuuccuugaggaucaauugucaacuggucaauacgacggaguugggcuagugcguuaaauugcugcagcauuacaagauuuguuuccuugaauuuaaggugcagagaauuaggaaacuuaaucuucaguuuaggaagcacuuggacgauuucaucaaauucuaugaaagugaaggagacuguugugaucauuccugcuguuugaacacuccaauuccuauccagagauuccagugcuccugagccauauagggaaaguguauccccguccacuucaacaagguaugugucuaugacagauaaaccuuguaaagcauuguugaguccugagucuagaggcccuguuuccucugggaaugcagagagggugcuuccaucaaucugacagggguccugaggagagucagaaucuuuucuaucuucauuuguagcaauauuggcuacucguuguuguugcaagucccacugucgagcuacguuguuaauuguuaaccuuuucuucuccuuaagcaaagauuguuuaugacuuucccgcuucuucucuuccucuuuuuuggcuaaaacagaugccauacgccuuucuucuuccgugauucucuucauaucuagcuggcgcagcugcaucauauucugaaggacaguguguuuguaccaugacucuugagcuaugggauugccaucaaaggugauguccgagagggaagaagagucagcaaggcaggaaacacugucaaaacuagauauauuguuaaagcugagaaagagauguuggaggcagggcaaauuauccacaucucucacgaaagugauuugauugugucgcaaguuaaguucaguuagugaauccagcccauuaagauuaucaacaugacuuaaaaaguuccuggcaagauuuaaaacucucaacucacacaaaugauuaauauuuucaauuuugguaaucugauuuccaugaagauccaagacaucuaagcuuuuuagauucuccagauuugagauuuucuugauucuguuuuuccccaacagaaggacacgaagacaucucagagucgaaagcccacuaauuucuucaaucugguuaucauauaaauccaacgauauuaacuucuguagauuagaaauauuuuguauccgaguuauaaaauuguguugaaaguucaacaaacgaagguggucuuccccauugaugauaggacauacggucagcuuuugucuuucuaggcucaaccugucugaguaaagaauuuucucuucagaagaacguugaagaauaggaaaugaugacaaugaugagcucaccaaauuaauaugaucaccuugccuacuugaguaguuucuuucaaggucauguuguaaaagucuaccggggaaugacgaugugucuuuauuuagcuugaauucaacuuuguuuuuuucaggaagcgaugauguuugaauaaccagaugaagcccgcaguucaccuugcacugcccagacacacagauggccgugccguucuggucacagggggugccaucgaugacuuucucagcuugccguacauagaagcgguagcccauugccuggcaguucaacucacauuugcgauugccuuuuacuucugcaaaugguucccacucauaaaaccggcccaugaauggcuuguuguuguaggaugcacacuguaccucccggauacuucuacugcuuucuggacauacguugguguugcacagcuuguacugccgauaggccccgaugcaugagauugcuguagaucgggcaggcugagagaagcucugaguugccccauggguccccacaccgugguuguugcuuguuucugggcugugaaagagacuugaagcugcaggguagccuugaucaugggucaaagguagcugguagaugggggccuccgcagccugcaguccagagcgagggccacugucacuuugguacaaaggcccauguugggggaccuggugggcuggugaacuguagccaugccuagcagaagaugcucccugggaccuggaauggcgggaugagagcuucugucuccggagccucuguggcgugugugcagugucugucugcagugguaagauauauggggccuuaccauagccauacuugccagggccaaugguaccacggguccugcuc

SEQ ID NO: 2208 - RNA, 1803 nt, Homo sapiens
uuaaggaggcaaacauacuuuauuuugacuaauuuguuaguaaguuuauucuucacucauaaaaagaacauauuuuuggcuuugaaaucaugacauaaaauaaaaagggaaauaacugaaaauuaucagcuaaaaguagguagaugcagcucaugcugaaucaucagcaaauacuacgugcuuugggcuauagcagggcaccaaucaaagcaagaaccaaggaugcagugccacgccaucucugaaaacuguuuaguucccaaagguuguuugguccucacauacaggcaauuaauccuuccuuucuccugcuuuccuuccuuccuucuuaacuuuuagcuaugagaacagugggcaauaaugcuuuuauacuagucuuucuaguuuauaggauaguguuguuguuguuuuaacauguauaaccugcauauuuucaaccuucaaaaaauaaaacugccaaaaucaacuguaacuaaaggccauuuuuauuuuuggucuguuaucugcuguaggcagagcuucauauaggaauuuuuauugcgaauuucuaugacugcaucccuaacaagcucaaugaacaucuguggccaaagcuucugcaaagccucauuuuucauguugauuucuguggcuuccuucacaaggucuucuauauauguuuuacagaauuucuucuuuuccuuuauuuccucuagcuuuucauuauaaaagucucuuguaguauaauuuaauguagcacgauuuguguuuucuccuacaagucuuuugcugucauuauuuucuucguugauaauaccagguuuuuuuccuuuggauucuaguagauaccgaaauugcuuuuuccuggcaucacccagaauggaaaucagacgauacugggguaacucagaagaugcuacaugugcuaggauuccaaagagccuuucagccauuaucauaucauucugugucaccucuguuccauuuauuuucugcauacugaaauggcuuagccuaaacaguacauaguauuuccagaguguaaaauugacaacuggauuuccuugaggaucaauugucaacuggucaauacgacggaguugggcuagugcguuaaauugcugcagcauuacaagauuuguuuccuugaauuuaaggugcagagaauuaggaaacuuaaucuucaguuuaggaagcacuuggacgauuucaucaaauucuaugaaagugaaggagacuguugugaucauuccugcuguuugaacacuccaauuccuauccagagauuccagugcuccugagccauauagggaaaguguauccccguccacuucaacaagguaugugucuaugacagauaaaccuuguaaagcauuguugaguccugagucuagaggcccuguuuccucugggaaugcagagagggugcuuccaucaaucugacagggguccugaggagagucagaaucuuuucuaucuucauuuguagcaauauuggcuacucguuguuguugcaagucccacugucgagcuacguuguuaauuguuaaccuuuucuucuccuuaagcaaagauuguuuaugacuuucccgcuucuucucuuccucuuuuuuggcuaaaacagaugccauacgccuuucuucuuccuuccuguguugaguggagggcugugggcagacgaacuggaauccaagcagcagaaggaaacacaggacacugagagaccccaugaaaugggaaaccaugaugcuggggguccaggcaaaagcaagggcucuucagagacguugccaauuuucugcaauugggaguugcguucaaguc

SEQ ID NO: 2209 - RNA, 951 nt, Homo sapiens
uuaaggaggcaaacauacuuuauuuugacuaauuuguuaguaaguuuauucuucacucauaaaaagaacauauuuuuggcuuugaaaucaugacauaaaauaaaaagggaaauaacugaaaauuaucagcuaaaaguagguagaugcagcucaugcugaaucaucagcaaauacuacgugcuuugggcuauagcagggcaccaaucaaagcaagaaccaaggaugcagugccacgccaucucugaaaacuguuuaguucccaaagguuguuugguccucacauacaggcaauuaauccuuccuuucuccugcuuuccuuccuuccuucuuaacuuuuagcuaugagaacagugggcaauaaugcuuuuauacuagucuuucuaguuuauaggauaguguuguuguuguuuuaacauguauaaccugcauauuuucaaccuucaaaaaauaaaacugccaaaaucaacuguaacuaaaggccauuuuuauuuuuggucuguuaucugcuguaggcagagcuucauauaggaauuuuuauugcgaauuucuaugacugcaucccuaacaagcucaaugaacaucuguggccaaagcuucugcaaagccucauuuuucauguugauuucuguggcuuccuucacaaggucuucuauauauguuuuacagaauuucuucuuuuccuuuauuuccucuagcuuuucauuauaaaagucucuuguaguauaauuuaauguagcacgauuuguguuuucuccuacaagucuuuugcugucauuauuuucuucguugauaauaccagguuuuuuuccuuuggauucuaguagauaccgaaauugcuuuuuccugagagaccccaugaaaugggaaaccaugaugcuggggguccaggcaaaagcaagggcucuucagagacguugccaauuuucugcaauugggaguugcguucaaguc

SEQ ID NO: 2210 - RNA, 1920 nt, Homo sapiens
uuaaggaggcaaacauacuuuauuuugacuaauuuguuaguaaguuuauucuucacucauaaaaagaacauauuuuuggcuuugaaaucaugacauaaaauaaaaagggaaauaacugaaaauuaucagcuaaaaguagguagaugcagcucaugcugaaucaucagcaaauacuacgugcuuugggcuauagcagggcaccaaucaaagcaagaaccaaggaugcagugccacgccaucucugaaaacuguuuaguucccaaagguuguuugguccucacauacaggcaauuaauccuuccuuucuccugcuuuccuuccuuccuucuuaacuuuuagcuaugagaacagugggcaauaaugcuuuuauacuagucuuucuaguuuauaggauaguguuguuguuguuuuaacauguauaaccugcauauuuucaaccuucaaaaaauaaaacugccaaaaucaacuguaacuaaaggccauuuuuauuuuuggucuguuaucugcuguaggcagagcuucauauaggaauuuuuauugcgaauuucuaugacugcaucccuaacaagcucaaugaacaucuguggccaaagcuucugcaaagccucauuuuucauguugauuucuguggcuuccuucacaaggucuucuauauauguuuuacagaauuucuucuuuuccuuuauuuccuugcacugcccagacacacagauggccgugccguucuggucacagggggugccaucgaugacuuucucagcuugccguacauagaagcgguagcccauugccuggcaguucaacucacauuugcgauugccuuuuacuucugcaaaugguucccacucauaaaaccggcccaugaauggcuuguuguuguaggaugcacacuguaccucccggauacuucuacugcuuucuggacauacguugguguugcacagcuuguacugccgauaggccccgaugcaugagauugcuguagaucgggcaggcugagagaagcucugaguugccccauggguccccacaccgugguuguugcuuguuucugggcugugaaagagacuugaagcugcaggguagccuugaucaugggucaaagguagcugguagaugggggccuccgcagccugcaguccagagcgagggccacugucacuuugguacaaaggcccauguugggggaccuggugggcuggugaacuguagccaugccuagcagaagaugcucccugggaccuggaauggcgggaugagagcuucugucuccggagccucuguggcgugugugcagugucugucugcagugguaagauauauggggccuuaccauagccauacuugccagggccaaugguaccacggguccugcuccuucuguccccagugacuucgaggcccuggggcugugggugccggcugccucgcagcaccguggggcccuggcggcuggcguccguaccggccagcgcuggcgucucgucgcggcuccggugcaguggcaccgacgugcgcaccgccgacaccacgugguccgcgaaggcgcgcgcaggggcgccaggccgcuggccgccgcgcaggcgguaggagcggggcaggcagggccgcgucugcuccaucacgccgccgcugcagcuacgcgagcaggccgaccaggggccccaggcgccccacacucccggggcgccgccgccgccgucguccucgggggcgcccuccgccgccauccgcugcgggaccuuccuguguugaguggagggcugugggcagacgaacuggaauccaagcagcagaaggaaacacaggacacugagagaccccaugaaaugggaaaccaugaugcuggggguccaggcaaaagcaagggcucuucagagacguugccaauuuucugcaauugggaguugcguucaaguc

SEQ ID NO: 2211 - RNA, 867 nt, Homo sapiens
uuaaggaggcaaacauacuuuauuuugacuaauuuguuaguaaguuuauucuucacucauaaaaagaacauauuuuuggcuuugaaaucaugacauaaaauaaaaagggaaauaacugaaaauuaucagcuaaaaguagguagaugcagcucaugcugaaucaucagcaaauacuacgugcuuugggcuauagcagggcaccaaucaaagcaagaaccaaggaugcagugccacgccaucucugaaaacuguuuaguucccaaagguuguuugguccucacauacaggcaauuaauccuuccuuucuccugcuuuccuuccuuccuucuuaacuuuuagcuaugagaacagugggcaauaaugcuuuuauacuagucuuucuaguuuauaggauaguguuguuguuguuuuaacauguauaaccugcauauuuucaaccuucaaaaaauaaaacugccaaaaucaacuguaacuaaaggccauuuuuauuuuuggucuguuaucugcuguaggcagagcuucauauaggaauuuuuauugcgaauuucuaugacugcaucccuaacaagcucaaugaacaucuguggccaaagcuucugcaaagccucauuuuucauguugauuucuguggcuuccuucacaaggucuucuauauauguuuuacagaauuucuucuuuuccuuuauuuccuuccuguguugaguggagggcugugggcagacgaacuggaauccaagcagcagaaggaaacacaggacacugagagaccccaugaaaugggaaaccaugaugcuggggguccaggcaaaagcaagggcucuucagagacguugccaauuuucugcaauugggaguugcguucaaguc

SEQ ID NO: 2212 - RNA, 1719 nt, Homo sapiens
uuaaggaggcaaacauacuuuauuuugacuaauuuguuaguaaguuuauucuucacucauaaaaagaacauauuuuuggcuuugaaaucaugacauaaaauaaaaagggaaauaacugaaaauuaucagcuaaaaguagguagaugcagcucaugcugaaucaucagcaaauacuacgugcuuugggcuauagcagggcaccaaucaaagcaagaaccaaggaugcagugccacgccaucucugaaaacuguuuaguucccaaagguuguuugguccucacauacaggcaauuaauccuuccuuucuccugcuuuccuuccuuccuucuuaacuuuuagcuaugagaacagugggcaauaaugcuuuuauacuagucuuucuaguuuauaggauaguguuguuguuguuuuaacauguauaaccugcauauuuucaaccuucaaaaaauaaaacugccaaaaucaacuguaacuaaaggccauuuuuauuuuuggucuguuaucugcuguaggcagagcuucauauaggaauuuuuauugcgaauuucuaugacugcaucccuaacaagcucaaugaacaucuguggccaaagcuucugcaaagccucauuuuucauguugauuucuguggcuuccuucacaaggucuucuauauauguuuuacagaauuucuucuuuuccuuuauuuccucuagcuuuucauuauaaaagucucuuguaguauaauuuaauguagcacgauuuguguuuucuccuacaagucuuuugcugucauuauuuucuucguugauaauaccagguuuuuuuccuuuggauucuaguagauaccgaaauugcuuuuuccuggcaucacccagaauggaaaucagacgauacugggguaacucagaagaugcuacaugugcuaggauuccaaagagccuuucagccauuaucauaucauucugugucaccucuguuccauuuauuuucugcauacugaaauggcuuagccuaaacaguacauaguauuuccagaguguaaaauugacaacuggauuuccuugaggaucaauugucaacuggucaauacgacggaguugggcuagugcguuaaauugcugcagcauuacaagauuuguuuccuugaauuuaaggugcagagaauuaggaaacuuaaucuucaguuuaggaagcacuuggacgauuucaucaaauucuaugaaagugaaggagacuguugugaucauuccugcuguuugaacacuccaauuccuauccagagauuccagugcuccugagccauauagggaaaguguauccccguccacuucaacaagguaugugucuaugacagauaaaccuuguaaagcauuguugaguccugagucuagaggcccuguuuccucugggaaugcagagagggugcuuccaucaaucugacagggguccugaggagagucagaaucuuuucuaucuucauuuguagcaauauuggcuacucguuguuguugcaagucccacugucgagcuacguuguuaauuguuaaccuuuucuucuccuuccuguguugaguggagggcugugggcagacgaacuggaauccaagcagcagaaggaaacacaggacacugagagaccccaugaaaugggaaaccaugaugcuggggguccaggcaaaagcaagggcucuucagagacguugccaauuuucugcaauugggaguugcguucaaguc

SEQ ID NO: 2213 - RNA, 2316 nt, Homo sapiens
uuaaggaggcaaacauacuuuauuuugacuaauuuguuaguaaguuuauucuucacucauaaaaagaacauauuuuuggcuuugaaaucaugacauaaaauaaaaagggaaauaacugaaaauuaucagcuaaaaguagguagaugcagcucaugcugaaucaucagcaaauacuacgugcuuugggcuauagcagggcaccaaucaaagcaagaaccaaggaugcagugccacgccaucucugaaaacuguuuaguucccaaagguuguuugguccucacauacaggcaauuaauccuuccuuucuccugcuuuccuuccuuccuucuuaacuuuuagcuaugagaacagugggcaauaaugcuuuuauacuagucuuucuaguuuauaggauaguguuguuguuguuuuaacauguauaaccugcauauuuucaaccuucaaaaaauaaaacugccaaaaucaacuguaacuaaaggccauuuuuauuuuuggucuguuaucugcuguaggcagagcuucauauaggaauuuuuauugcgaauuucuaugacugcaucccuaacaagcucaaugaacaucuguggccaaagcuucugcaaagccucauuuuucauguugauuucuguggcuuccuucacaaggucuucuauauauguuuuacagaauuucuucuuuuccuuuauuuccucuagcuuuucauuauaaaagucucuuguaguauaauuuaauguagcacgauuuguguuuucuccuacaagucuuuugcugucauuauuuucuucguugauaauaccagguuuuuuuccuuuggauucuaguagauaccgaaauugcuuuuuccuggcaucacccagaauggaaaucagacgauacugggguaacucagaagaugcuacaugugcuaggauuccaaagagccuuucagccauuaucauaucauucugugucaccucuguuccauuuauuuucugcauacugaaauggcuuagccuaaacaguacauaguauuuccagaguguaaaauugacaacuggauuuccuugaggaucaauugucaacuggucaauacgacggaguugggcuagugcguuaaauugcugcagcauuacaagauuuguuuccuugaauuuaaggugcagagaauuaggaaacuuaaucuucaguuuaggaagcacuuggacgauuucaucaaauucuaugaaagugaaggagacuguugugaucauuccugcuguuugaacacuccaauuccuauccagagauuccagugcuccugagccauauagggaaaguguauccccguccacuucaacaagguaugugucuaugacagauaaaccuuguaaagcauuguugaguccugagucuagaggcccuguuuccucugggaaugcagagagggugcuuccaucaaucugacagggguccugaggagagucagaaucuuuucuaucuucauuuguagcaauauuggcuacucguuguuguugcaagucccacugucgagcuacguuguuaauuguuaaccuuuucuucuccuuaagcaaagauuguuuaugacuuucccgcuucuucucuuccucuuuuuuggcuaaaacagaugccauacgccuuucuucuuccgugauucucuucauaucuagcuggcgcagcugcaucauauucugaaggacaguguguuuguaccaugacucuugagcuaugggauugccaucaaaggugauguccgagagggaagaagagucagcaaggcaggaaacacugucaaaacuucuguccccagugacuucgaggcccuggggcugugggugccggcugccucgcagcaccguggggcccuggcggcuggcguccguaccggccagcgcuggcgucucgucgcggcuccggugcaguggcaccgacgugcgcaccgccgacaccacgugguccgcgaaggcgcgcgcaggggcgccaggccgcuggccgccgcgcaggcgguaggagcggggcaggcagggccgcgucugcuccaucacgccgccgcugcagcuacgcgagcaggccgaccaggggccccaggcgccccacacucccggggcgccgccgccgccgucguccucgggggcgcccuccgccgccauccgcugcgggaccuuccuguguugaguggagggcugugggcagacgaacuggaauccaagcagcagaaggaaacacaggacacugagagaccccaugaaaugggaaaccaugaugcuggggguccaggcaaaagcaagggcucuucagagacguugccaauuuucugcaauugggaguugcguucaaguc

SEQ ID NO: 2214 - RNA, 1377 nt, Homo sapiens
uuaaggaggcaaacauacuuuauuuugacuaauuuguuaguaaguuuauucuucacucauaaaaagaacauauuuuuggcuuugaaaucaugacauaaaauaaaaagggaaauaacugaaaauuaucagcuaaaaguagguagaugcagcucaugcugaaucaucagcaaauacuacgugcuuugggcuauagcagggcaccaaucaaagcaagaaccaaggaugcagugccacgccaucucugaaaacuguuuaguucccaaagguuguuugguccucacauacaggcaauuaauccuuccuuucuccugcuuuccuuccuuccuucuuaacuuuuagcuaugagaacagugggcaauaaugcuuuuauacuagucuuucuaguuuauaggauaguguuguuguuguuuuaacauguauaaccugcauauuuucaaccuucaaaaaauaaaacugccaaaaucaacuguaacuaaaggccauuuuuauuuuuggucuguuaucugcuguaggcagagcuucauauaggaauuuuuauugcgaauuucuaugacugcaucccuaacaagcucaaugaacaucuguggccaaagcuucugcaaagccucauuuuucauguugauuucuguggcuuccuucacaaggucuucuauauauguuuuacagaauuucuucuuuuccuuuauuuccuugcacugcccagacacacagauggccgugccguucuggucacagggggugccaucgaugacuuucucagcuugccguacauagaagcgguagcccauugccuggcaguucaacucacauuugcgauugccuuuuacuucugcaaaugguucccacucauaaaaccggcccaugaauggcuuguuguuguaggaugcacacuguaccucccggauacuucuacugcuuucuggacauacguugguguugcacagcuuguacugccgauaggccccgaugcaugagauugcuguagaucgggcaggcugagagaagcucugaguugccccauggguccccacaccgugguuguugcuuguuucugggcugugaaagagacuugaagcugcaggguagccuugaucaugggucaaagguagcugguagaugggggccuccgcagccugcaguccagagcgagggccacugucacuuugguacaaaggcccauguugggggaccuggugggcuggugaacuguagccaugccuagcagaagaugcucccugggaccuggaauggcgggaugagagcuucugucuccggagccucuguggcgugugugcagugucugucugcagugguaagauauauggggccuuaccauagccauacuugccagggccaaugguaccacggguccugcuc

SEQ ID NO: 2215 - RNA, 3729 nt, Homo sapiens
uuaaggaggcaaacauacuuuauuuugacuaauuuguuaguaaguuuauucuucacucauaaaaagaacauauuuuuggcuuugaaaucaugacauaaaauaaaaagggaaauaacugaaaauuaucagcuaaaaguagguagaugcagcucaugcugaaucaucagcaaauacuacgugcuuugggcuauagcagggcaccaaucaaagcaagaaccaaggaugcagugccacgccaucucugaaaacuguuuaguucccaaagguuguuugguccucacauacaggcaauuaauccuuccuuucuccugcuuuccuuccuuccuucuuaacuuuuagcuaugagaacagugggcaauaaugcuuuuauacuagucuuucuaguuuauaggauaguguuguuguuguuuuaacauguauaaccugcauauuuucaaccuucaaaaaauaaaacugccaaaaucaacuguaacuaaaggccauuuuuauuuuuggucuguuaucugcuguaggcagagcuucauauaggaauuuuuauugcgaauuucuaugacugcaucccuaacaagcucaaugaacaucuguggccaaagcuucugcaaagccucauuuuucauguugauuucuguggcuuccuucacaaggucuucuauauauguuuuacagaauuucuucuuuuccuuuauuuccucuagcuuuucauuauaaaagucucuuguaguauaauuuaauguagcacgauuuguguuuucuccuacaagucuuuugcugucauuauuuucuucguugauaauaccagguuuuuuuccuuuggauucuaguagauaccgaaauugcuuuuuccuggcaucacccagaauggaaaucagacgauacugggguaacucagaagaugcuacaugugcuaggauuccaaagagccuuucagccauuaucauaucauucugugucaccucuguuccauuuauuuucugcauacugaaauggcuuagccuaaacaguacauaguauuuccagaguguaaaauugacaacuggauuuccuugaggaucaauugucaacuggucaauacgacggaguugggcuagugcguuaaauugcugcagcauuacaagauuuguuuccuugaauuuaaggugcagagaauuaggaaacuuaaucuucaguuuaggaagcacuuggacgauuucaucaaauucuaugaaagugaaggagacuguugugaucauuccugcuguuugaacacuccaauuccuauccagagauuccagugcuccugagccauauagggaaaguguauccccguccacuucaacaagguaugugucuaugacagauaaaccuuguaaagcauuguugaguccugagucuagaggcccuguuuccucugggaaugcagagagggugcuuccaucaaucugacagggguccugaggagagucagaaucuuuucuaucuucauuuguagcaauauuggcuacucguuguuguugcaagucccacugucgagcuacguuguuaauuguuaaccuuuucuucuccuuaagcaaagauuguuuaugacuuucccgcuucuucucuuccucuuuuuuggcuaaaacagaugccauacgccuuucuucuuccgugauucucuucauaucuagcuggcgcagcugcaucauauucugaaggacaguguguuuguaccaugacucuugagcuaugggauugccaucaaaggugauguccgagagggaagaagagucagcaaggcaggaaacacugucaaaacuagauauauuguuaaagcugagaaagagauguuggaggcagggcaaauuauccacaucucucacgaaagugauuugauugugucgcaaguuaaguucaguuagugaauccagcccauuaagauuaucaacaugacuuaaaaaguuccuggcaagauuuaaaacucucaacucacacaaaugauuaauauuuucaauuuugguaaucugauuuccaugaagauccaagacaucuaagcuuuuuagauucuccagauuugagauuuucuugauucuguuuuuccccaacagaaggacacgaagacaucucagagucgaaagcccacuaauuucuucaaucugguuaucauauaaauccaacgauauuaacuucuguagauuagaaauauuuuguauccgaguuauaaaauuguguugaaaguucaacaaacgaagguggucuuccccauugaugauaggacauacggucagcuuuugucuuucuaggcucaaccugucugaguaaagaauuuucucuucagaagaacguugaagaauaggaaaugaugacaaugaugagcucaccaaauuaauaugaucaccuugccuacuugaguaguuucuuucaaggucauguuguaaaagucuaccggggaaugacgaugugucuuuauuuagcuugaauucaacuuuguuuuuuucaggaagcgaugauguuugaauaaccagaugaagcccgcaguucaccuugcacugcccagacacacagauggccgugccguucuggucacagggggugccaucgaugacuuucucagcuugccguacauagaagcgguagcccauugccuggcaguucaacucacauuugcgauugccuuuuacuucugcaaaugguucccacucauaaaaccggcccaugaauggcuuguuguuguaggaugcacacuguaccucccggauacuucuacugcuuucuggacauacguugguguugcacagcuuguacugccgauaggccccgaugcaugagauugcuguagaucgggcaggcugagagaagcucugaguugccccauggguccccacaccgugguuguugcuuguuucugggcugugaaagagacuugaagcugcaggguagccuugaucaugggucaaagguagcugguagaugggggccuccgcagccugcaguccagagcgagggccacugucacuuugguacaaaggcccauguugggggaccuggugggcuggugaacuguagccaugccuagcagaagaugcucccugggaccuggaauggcgggaugagagcuucugucuccggagccucuguggcgugugugcagugucugucugcagugguaagauauauggggccuuaccauagccauacuugccagggccaaugguaccacggguccugcuccuucuguccccagugacuucgaggcccuggggcugugggugccggcugccucgcagcaccguggggcccuggcggcuggcguccguaccggccagcgcuggcgucucgucgcggcuccggugcaguggcaccgacgugcgcaccgccgacaccacgugguccgcgaaggcgcgcgcaggggcgccaggccgcuggccgccgcgcaggcgguaggagcggggcaggcagggccgcgucugcuccaucacgccgccgcugcagcuacgcgagcaggccgaccaggggccccaggcgccccacacucccggggcgccgccgccgccgucguccucgggggcgcccuccgccgccauccgcugcgggaccuuccuguguugaguggagggcugugggcagacgaacuggaauccaagcagcagaaggaaacacaggacacugagagaccccaugaaaugggaaaccaugaugcuggggguccaggcaaaagcaagggcucuucagagacguugccaauuuucugcaauugggaguugcguucaaguc

SEQ ID NO: 2216 - RNA, 3673 nt, Homo sapiens
gccguuuauacugauuacauguugaagugauaauacuuugcauauauuuggguuaaauaagauuaaaauuaauuccaccuguuuccuuugacuguuaaguggcuauuagaaaauuuaaacugaaaaccucacacguggcucacgcuguauuucuauuuggcucuaaccccucacagcuccuaucaugagugaaauuaucuuuucugcugauuuacuugguuuucaucugucuccccggcugggaugccagccccccucaaucccccugagcagggaucucagcugucuccucuacugcuguacguccccucgccccuaacagaaccuggcauccccgggugcugacuugaugaauggaugaugcaaguaccaggucucauuacucaaagcccaccugugcccccuccaagggagggucccaggccuuccagaacaggcagaguaguggcaacgcggcaugcaaaagacgcaagcgugcugcgcagcccccagcagugaccgcucccacuccggcagagacgcaggacugcugcuggaggugggcuccaggcugcgguuggccagaggguccgaucugaggccccuuucccccagcaggcaagcgaauggcugucagcccgggcugcccucuggccagcaccuacuuggcuccggauuuggcagaugacagggaccagcagcaggacgcagcccagcgccaggaggacguacugggcauagugcaucaccuugggcaucaacaccagcugaguguagaaugugugaagagucucccccuccauggccccgcucucugcaaaccagagcagcggcaggaccacaggcucaaucuucccaguuuguccaaugccugcgacagauuucauguagaggcucagcugcaguuucacagagcaguucauggggauucccgugaccggguggauguccaggaacaaggagugugccuccugguuagggugcaggccagucaccgcuucugccagaaccgggucagcguugaggaagugaggaugggagagaaacaagggggcacugaaccugcaggugcugacguucugaauuccagacuccaggcacgggcagaagccuucguuggguggguagauggacccguuggcaaacaggguuuugggagccacgaagcgauagguggggaugccuucaaacaccccugacuccuuguacauuagcuucauggaucggcaggccuccgggcuguagaacuccagcgaggacucaggagucaugaagggcggccacauuugcccagaaguuccauugaucauguugcacugaucggaaugccagaagucaaccuugcucagcccguuccacuuguccacgagguggauccugcugauguucuggacccccgugaacaccgugaagagcccagagucggaguuguugagcucagcaaauaauccgaacuuguccuugaaggggaacaugccuggaaaguacuuguugaugagauucacaaggggguccuuguagccccacaugaucucacccacagugcgguucaugaaggcacguucgccgaggguggugaaugccaaggucaugaugagcuucagggucaugggcuuauucuccaucaucaccgccgcacccaagaccaggauguugggcaugacgauguagucgcucuccgagccgugggacuuggagggcuggaacuggaaggugcgguacucgaggaaggacacggugucguuguuguugaaggugauguugcuuuugugccugaacucccuguacacguagggcccgcgcucccgcaccugcggcuucucgcccuucaggaucucgcugggguucaugacgucaaagaaguagacggagagauagaaggggauagggaucuccuuccacauguugaaggacaggcuacuggggucgaugcgcacguucuggcucuugccgcggcgccgauagcuccgucucaccaggcucuuauaguucucauucuucuuagucagguaguaauagaggacgcacucagccacugucuuccucuccaggaaugaugcgaucaggccaaaguucuugggaugcugcaugaacuucucccggaaggucuccuucuccugcucacuccacauguucaugaccuggcggucuuuguacaccuucauggggucggccauaagcccguucauguugaugaacuugaugcgcugcuggucagcgucguacagcaugggcgggaucacggccagcuggcgcaucugcuucuccagguucuccugcucugagaggccaucgaugaucucugacaccucgugcucgcugcgggcggccgacauggacagcccacugccccgcuggcccacccugcucugcaugcgcuccugcagcucgcgcugcuugcggaucucagggaacugcuucucguaguacucgcgcaccuugcucuccuuggcccgccgccggggguuguucucgaugcgcuccaccuucuucucccaggccuccaugagcuggucauagcgcuggcagaacuucugcucccauuguuuccgagcgugauuccuccucuugaaguacaagauuagcuucuuccgcaucgccugguuuauuuugauguucucaugauacugccgggugucggagggcugguuguacagcggcagcuccaccuggggccccaggccuuccagaauccgaugugcagcuucagccuucuuccgguucucgucguagaugaucugcaccaggcugcggugcuucgacucgaugggcggcggugacacgggcuucucaggcucgggcggcuuggcagccuccuccuccagcuguugcugcuucuucuucagcuuagagaucugcugcucuaccauggugaucucucgguccacgcgguccauguucuggaucagcuccuccuuggacagccguggcggcaccagcuccagcucagggucagugugcggggggcuggggggagacaccgguuccagcuugcccgucaggcuacgguccuuggugaggucuucagaucccgcaggcuggcccguggccagcaggggugacggucgcagcagggggucaggcagcagcucuagccgagggcgcuugcuuucaaugaacuccaucucugacuuccccagcucgggcagguaugagugggacucuggccgcagguggagcuccugggaccguucauucccgggcuggaacucagacagcagggagggccuccgccgcuggggcuggaugauggagccgggcgacaggugggaggcauagucgcgggaguggugcugguacuccaggagcccgacguccgugugcguccgggcgaucugcacuggguaggaaaggcuguggggcggguagcggggcucaguggcccuccacgucugugccacaggcuguguggaucccgacaugguggugggggucggcggggagcugcucccaggccccaauaagcuuucucuuaaucaccaccaaggauuaaaagccaguccucgucaucagcucacgggccaccccgucacuggcacccgagcacaugaccaaccucgcucacgucagcuccaaacacaacuugaaguaacucucucacaagaaaaaaaaagaaaaagaaaaaaagugccagccagcgggccagcagaguccacacacacaggcugugcugccggcuuccaggaggcacacc

SEQ ID NO: 2217 - RNA, 2953 nt, Homo sapiens
gccguuuauacugauuacauguugaagugauaauacuuugcauauauuuggguuaaauaagauuaaaauuaauuccaccuguuuccuuugacuguuaaguggcuauuagaaaauuuaaacugaaaaccucacacguggcucacgcuguauuucuauuuggcucuaaccccucacagcuccuaucaugagugaaauuaucuuuucugcugauuuacuugguuuucaucugucuccccggcugggaugccagccccccucaaucccccugagcagggaucucagcugucuccucuacugcuguacguccccucgccccuaacagaaccuggcauccccgggugcugacuugaugaauggaugaugcaaguaccaggucucauuacucaaagcccaccugugcccccuccaagggagggucccaggccuuccagaacaggcagaguaguggcaacgcggcaugcaaaagacgcaagcgugcugcgcagcccccagcagugaccgcucccacuccggcagagacgcaggacugcugcuggaggugggcuccaggcugcgguuggccagaggguccgaucugaggccccuuucccccagcaggcaagcgaauggcugucagcccgggcugcccucuggccagcaccuacuuggcuccggauuuggcagaugacagggaccagcagcaggacgcagcccagcgccaggaggacguacugggcauagugcaucaccuugggcaucaacaccagcugaguguagaaugugugaagagucucccccuccauggccccgcucucugcaaaccagagcagcggcaggaccacaggcucaaucuucccaguuuguccaaugccugcgacagauuucauguagaggcucagcugcaguuucacagagcaguucauggggauucccgugaccggguggauguccaggaacaaggagugugccuccugguuagggugcaggccagucaccgcuucugccagaaccgggucagcguugaggaagugaggaugggagagaaacaagggggcacugaaccugcaggugcugacguucugaauuccagacuccaggcacgggcagaagccuucguuggguggguagauggacccguuggcaaacaggguuuugggagccacgaagcgauagguggggaugccuucaaacaccccugacuccuuguacauuagcuucauggaucggcaggccuccgggcuguagaacuccagcgaggacucaggagucaugaagggcggccacauuugcccagaaguuccauugaucauguugcacugaucggaaugccagaagucaaccuugcucagcccguuccacuuguccacgagguggauccugcugauguucuggacccccgugaacaccgugaagagcccagagucggaguuguugagcucagcaaauaauccgaacuuguccuugaaggggaacaugccuggaaaguacuuguugaugagauucacaaggggguccuuguagccccacaugaucucacccacagugcgguucaugaaggcacguucgccgaggguggugaaugccaaggucaugaugagcuucagggucaugggcuuauucuccaucaucaccgccgcacccaagaccaggauguugggcaugacgauguagucgcucuccgagccgugggacuuggagggcuggaacuggaaggugcgguacucgaggaaggacacggugucguuguuguugaaggugauguugcuuuugugccugaacucccuguacacguagggcccgcgcucccgcaccugcggcuucucgcccuucaggaucucgcugggguucaugacgucaaagaaguagacggagagauagaaggggauagggaucuccuuccacauguugaaggacaggcuacuggggucgaugcgcacguucagcuccaccuggggccccaggccuuccagaauccgaugugcagcuucagccuucuuccgguucucgucguagaugaucugcaccaggcugcggugcuucgacucgaugggcggcggugacacgggcuucucaggcucgggcggcuuggcagccuccuccuccagcuguugcugcuucuucuucagcuuagagaucugcugcucuaccauggugaucucucgguccacgcgguccauguucuggaucagcuccuccuuggacagccguggcggcaccagcuccagcucagggucagugugcggggggcuggggggagacaccgguuccagcuugcccgucaggcuacgguccuuggugaggucuucagaucccgcaggcuggcccguggccagcaggggugacggucgcagcagggggucaggcagcagcucuagccgagggcgcuugcuuucaaugaacuccaucucugacuuccccagcucgggcagguaugagugggacucuggccgcagguggagcuccugggaccguucauucccgggcuggaacucagacagcagggagggccuccgccgcuggggcuggaugauggagccgggcgacaggugggaggcauagucgcgggaguggugcugguacuccaggagcccgacguccgugugcguccgggcgaucugcacuggguaggaaaggcuguggggcggguagcggggcucaguggcccuccacgucugugccacaggcuguguggaucccgacaugguggugggggucggcggggagcugcucccaggccccaauaagcuuucucuuaaucaccaccaaggauuaaaagccaguccucgucaucagcucacgggccaccccgucacuggcacccgagcacaugaccaaccucgcucacgucagcuccaaacacaacuugaaguaacucucucacaagaaaaaaaaagaaaaagaaaaaaagugccagccagcgggccagcagaguccacacacacaggcugugcugccggcuuccaggaggcacacc

SEQ ID NO: 2218 - RNA, 3341 nt, Homo sapiens
ucccauuuuuuuaaacguuuauuacuucaagagugaauuauuuuucaaagaugauaaaacucauuucuauuccaguagaaaagggucacagguuugccccaggguccaggagcgcccggaaggcagggcccccaggccucuucaccucagccugggcaccuauaaucugagggacccugugagggggugggggcagcucgggggcacagccugcggccacuucggccagagaguggccggcucaguccauaggaugaugucaguuuaggcuggaggaaaagggcgccagacaacccgaugcagugccugugaagacuucggggggaucaaaguccggccggggugggcggagacccucgggcagcugcacagggcaucuugugcucacuccauuguuuuccgaggccuguguaaaggcgcuuugccuggccuggcagguagaccaaggccaaagcucguggccagggccugggcacugaguccccacugaauuuggcacaggaaggcggcacucccagccuggcccguccugcauggggagccaccacaccgggacugcaguguuucaccuuggaggggaggaagccugggcccaacggcugaacgggacaggccaggcucacccgaggaaggggacgcaggacccacagccccuguggucaggccugugggccacguggagagaagguuccagaacagugcuuguugacgagccucucccuacaagucccuucagcagcagcuccaucccugagugucugcacaagccugcacgcauguguguaugugugccagggcgugugugcaggugugcaacaggcacauggcagcugggaggcucaggcuguggggcuggggggcuguccgcugggagaguccgggagaagcgggguguaggggcuggggggccggucaggcccagcggccaggccuggcuggcucacgguguccucaggacccuacaguuuugcuuccugcagcacagagcccuugggagcugaugucaucagggauucagaauaggccugaauggccuccuuauccuuugagcccuuuuuacuacuacuccaaaauaaauagcauuucucuuggcuccggauuuggcagaugacagggaccagcagcaggacgcagcccagcgccaggaggacguacugggcauagugcaucaccuugggcaucaacaccagcugaguguagaaugugugaagagucucccccuccauggccccgcucucugcaaaccagagcagcggcaggaccacaggcucaaucuucccaguuuguccaaugccugcgacagauuucauguagaggcucagcugcaguuucacagagcaguucauggggauucccgugaccggguggauguccaggaacaaggagugugccuccugguuagggugcaggccagucaccgcuucugccagaaccgggucagcguugaggaagugaggaugggagagaaacaagggggcacugaaccugcaggugcugacguucugaauuccagacuccaggcacgggcagaagccuucguuggguggguagauggacccguuggcaaacaggguuuugggagccacgaagcgauagguggggaugccuucaaacaccccugacuccuuguacauuagcuucauggaucggcaggccuccgggcuguagaacuccagcgaggacucaggagucaugaagggcggccacauuugcccagaaguuccauugaucauguugcacugaucggaaugccagaagucaaccuugcucagcccguuccacuuguccacgagguggauccugcugauguucuggacccccgugaacaccgugaagagcccagagucggaguuguugagcucagcaaauaauccgaacuuguccuugaaggggaacaugccuggaaaguacuuguugaugagauucacaaggggguccuuguagccccacaugaucucacccacagugcgguucaugaaggcacguucgccgaggguggugaaugccaaggucaugaugagcuucagggucaugggcuuauucuccaucaucaccgccgcacccaagaccaggauguugggcaugacgauguagucgcucuccgagccgugggacuuggagggcuggaacuggaaggugcgguacucgaggaaggacacggugucguuguuguugaaggugauguugcuuuugugccugaacuccauuuugauguucucaugauacugccgggugucggagggcugguuguacagcggcagcuccaccuggggccccaggccuuccagaauccgaugugcagcuucagccuucuuccgguucucgucguagaugaucugcaccaggcugcggugcuucgacucgaugggcggcggugacacgggcuucucaggcucgggcggcuuggcagccuccuccuccagcuguugcugcuucuucuucagcuuagagaucugcugcucuaccauggugaucucucgguccacgcgguccauguucuggaucagcuccuccuuggacagccguggcggcaccagcuccagcucagggucagugugcggggggcuggggggagacaccgguuccagcuugcccgucaggcuacgguccuuggugaggucuucagaucccgcaggcuggcccguggccagcaggggugacggucgcagcagggggucaggcagcagcucuagccgagggcgcuugcuuucaaugaacuccaucucugacuuccccagcucgggcagguaugagugggacucuggccgcagguggagcuccugggaccguucauucccgggcuggaacucagacagcagggagggccuccgccgcuggggcuggaugauggagccgggcgacaggugggaggcauagucgcgggaguggugcugguacuccaggagcccgacguccgugugcguccgggcgaucugcacuggguaggaaaggcuguggggcggguagcggggcucaguggcccuccacgucugugccacaggcuguguggaucccgacaugguggugggggucggcggggagcugcucccaggccccaauaagcuuucucuuaaucaccaccaaggauuaaaagccaguccucgucaucagcucacgggccaccccgucacuggcaccagaaacugccuccagcgaggcuguguccucaaagacucagggagaccucgcggagguggcagcgguggcgcccgggcuuggggcgcgcucgggccgccggggcgcucaggcaaguggcggugccgaucgggcugggggcgcgcagcaggcccggccucgggucgggacgcgauccucccgccgccgccuccuagggcgccggc

SEQ ID NO: 2219 - RNA, 2896 nt, Homo sapiens
gccguuuauacugauuacauguugaagugauaauacuuugcauauauuuggguuaaauaagauuaaaauuaauuccaccuguuuccuuugacuguuaaguggcuauuagaaaauuuaaacugaaaaccucacacguggcucacgcuguauuucuauuuggcucuaaccccucacagcuccuaucaugagugaaauuaucuuuucugcugauuuacuugguuuucaucugucuccccggcugggaugccagccccccucaaucccccugagcagggaucucagcugucuccucuacugcuguacguccccucgccccuaacagaaccuggcauccccgggugcugacuugaugaauggaugaugcaaguaccaggucucauuacucaaagcccaccugugcccccuccaagggagggucccaggccuuccagaacaggcagaguaguggcaacgcggcaugcaaaagacgcaagcgugcugcgcagcccccagcagugaccgcucccacuccggcagagacgcaggacugcugcuggaggugggcuccaggcugcgguuggccagaggguccgaucugaggccccuuucccccagcaggcaagcgaauggcugucagcccgggcugcccucuggccagcaccuacuuggcuccggauuuggcagaugacagggaccagcagcaggacgcagcccagcgccaggaggacguacugggcauagugcaucaccuugggcaucaacaccagcugaguguagaaugugugaagagucucccccuccauggccccgcucucugcaaaccagagcagcggcaggaccacaggcucaaucuucccaguuuguccaaugccugcgacagauuucauguagaggcucagcugcaguuucacagagcaguucauggggauucccgugaccggguggauguccaggaacaaggagugugccuccugguuagggugcaggccagucaccgcuucugccagaaccgggucagcguugaggaagugaggaugggagagaaacaagggggcacugaaccugcaggugcugacguucugaauuccagacuccaggcacgggcagaagccuucguuggguggguagauggacccguuggcaaacaggguuuugggagccacgaagcgauagguggggaugccuucaaacaccccugacuccuuguacauuagcuucauggaucggcaggccuccgggcuguagaacuccagcgaggacucaggagucaugaagggcggccacauuugcccagaaguuccauugaucauguugcacugaucggaaugccagaagucaaccuugcucagcccguuccacuuguccacgagguggauccugcugauguucuggacccccgugaacaccgugaagagcccagagucggaguuguugagcucagcaaauaauccgaacuuguccuugaaggggaacaugccuggaaaguacuuguugaugagauucacaaggggguccuuguagccccacaugaucucacccacagugcgguucaugaaggcacguucgccgaggguggugaaugccaaggucaugaugagcuucagggucaugggcuuauucuccaucaucaccgccgcacccaagaccaggauguugggcaugacgauguagucgcucuccgagccgugggacuuggagggcuggaacuggaaggugcgguacucgaggaaggacacggugucguuguuguugaaggugauguugcuuuugugccugaacucccuguacacguagggcccgcgcucccgcaccugcggcuucucgcccuucaggaucucgcugggguucaugacgucaaagaaguagacggagagauagaaggggauagggaucuccuuccacauguugaaggacaggcuacuggggucgaugcgcacguuccgguucucgucguagaugaucugcaccaggcugcggugcuucgacucgaugggcggcggugacacgggcuucucaggcucgggcggcuuggcagccuccuccuccagcuguugcugcuucuucuucagcuuagagaucugcugcucuaccauggugaucucucgguccacgcgguccauguucuggaucagcuccuccuuggacagccguggcggcaccagcuccagcucagggucagugugcggggggcuggggggagacaccgguuccagcuugcccgucaggcuacgguccuuggugaggucuucagaucccgcaggcuggcccguggccagcaggggugacggucgcagcagggggucaggcagcagcucuagccgagggcgcuugcuuucaaugaacuccaucucugacuuccccagcucgggcagguaugagugggacucuggccgcagguggagcuccugggaccguucauucccgggcuggaacucagacagcagggagggccuccgccgcuggggcuggaugauggagccgggcgacaggugggaggcauagucgcgggaguggugcugguacuccaggagcccgacguccgugugcguccgggcgaucugcacuggguaggaaaggcuguggggcggguagcggggcucaguggcccuccacgucugugccacaggcuguguggaucccgacaugguggugggggucggcggggagcugcucccaggccccaauaagcuuucucuuaaucaccaccaaggauuaaaagccaguccucgucaucagcucacgggccaccccgucacuggcacccgagcacaugaccaaccucgcucacgucagcuccaaacacaacuugaaguaacucucucacaagaaaaaaaaagaaaaagaaaaaaagugccagccagcgggccagcagaguccacacacacaggcugugcugccggcuuccaggaggcacacc

SEQ ID NO: 2220 - RNA, 3719 nt, Homo sapiens
gccguuuauacugauuacauguugaagugauaauacuuugcauauauuuggguuaaauaagauuaaaauuaauuccaccuguuuccuuugacuguuaaguggcuauuagaaaauuuaaacugaaaaccucacacguggcucacgcuguauuucuauuuggcucuaaccccucacagcuccuaucaugagugaaauuaucuuuucugcugauuuacuugguuuucaucugucuccccggcugggaugccagccccccucaaucccccugagcagggaucucagcugucuccucuacugcuguacguccccucgccccuaacagaaccuggcauccccgggugcugacuugaugaauggaugaugcaaguaccaggucucauuacucaaagcccaccugugcccccuccaagggagggucccaggccuuccagaacaggcagaguaguggcaacgcggcaugcaaaagacgcaagcgugcugcgcagcccccagcagugaccgcucccacuccggcagagacgcaggacugcugcuggaggugggcuccaggcugcgguuggccagaggguccgaucugaggccccuuucccccagcaggcaagcgaauggcugucagcccgggcugcccucuggccagcaccuacuuggcuccggauuuggcagaugacagggaccagcagcaggacgcagcccagcgccaggaggacguacugggcauagugcaucaccuugggcaucaacaccagcugaguguagaaugugugaagagucucccccuccauggccccgcucucugcaaaccagagcagcggcaggaccacaggcucaaucuucccaguuuguccaaugccugcgacagauuucauguagaggcucagcugcaguuucacagagcaguucauggggauucccgugaccggguggauguccaggaacaaggagugugccuccugguuagggugcaggccagucaccgcuucugccagaaccgggucagcguugaggaagugaggaugggagagaaacaagggggcacugaaccugcaggugcugacguucugaauuccagacuccaggcacgggcagaagccuucguuggguggguagauggacccguuggcaaacaggguuuugggagccacgaagcgauagguggggaugccuucaaacaccccugacuccuuguacauuagcuucauggaucggcaggccuccgggcuguagaacuccagcgaggacucaggagucaugaagggcggccacauuugcccagaaguuccauugaucauguugcacugaucggaaugccagaagucaaccuugcucagcccguuccacuuguccacgagguggauccugcugauguucuggacccccgugaacaccgugaagagcccagagucggaguuguugagcucagcaaauaauccgaacuuguccuugaaggggaacaugccuggaaaguacuuguugaugagauucacaaggggguccuuguagccccacaugaucucacccacagugcgguucaugaaggcacguucgccgaggguggugaaugccaaggucaugaugagcuucagggucaugggcuuauucuccaucaucaccgccgcacccaagaccaggauguugggcaugacgauguagucgcucuccgagccgugggacuuggagggcuggaacuggaaggugcgguacucgaggaaggacacggugucguuguuguugaaggugauguugcuuuugugccugaacucccuguacacguagggcccgcgcucccgcaccugcggcuucucgcccuucaggaucucgcugggguucaugacgucaaagaaguagacggagagauagaaggggauagggaucuccuuccacauguugaaggacaggcuacuggggucgaugcgcacguucuggcucuugccgcggcgccgauagcuccgucucaccaggcucuuauaguucucauucuucuuagucagguaguaauagaggacgcacucagccacugucuuccucuccaggaaugaugcgaucaggccaaaguucuugggaugcugcaugaacuucucccggaaggucuccuucuccugcucacuccacauguucaugaccuggcggucuuuguacaccuucauggggucggccauaagcccguucauguugaugaacuugaugcgcugcuggucagcgucguacagcaugggcgggaucacggccagcuggcgcaucugcuucuccagguucuccugcucugagaggccaucgaugaucucugacaccucgugcucgcugcgggcggccgacauggacagcccacugccccgcuggcccacccucugcaugcgcuccugcagcucgcgcugcuugcggaucucagggaacugcuucucguaguacucgcgcaccuugcucuccuuggcccgccgccggggguuguucucgaugcgcuccaccuucuucucccaggccuccaugagcuggucauagcgcuggcagaacuucugcucccauuguuuccgagcgugauuccuccucuugaaguacaagauuagcuucuuccgcaucgccugguuuauuuugauguucucaugauacugccgggugucggagggcugguuguacagcggcagcuccaccuggggccccaggccuuccagaauccgaugugcagcuucagccuucuuccgguucucgucguagaugaucugcaccaggcugcggugcuucgacucgaugggcggcggugacacgggcuucucaggcucgggcggcuuggcagccuccuccuccagcuguugcugcuucuucuucagcuuagagaucugcugcucuaccauggugaucucucgguccacgcgguccauguucuggaucagcuccuccuuggacagccguggcggcaccagcuccagcucagggucagugugcggggggcuggggggagacaccgguuccagcuugcccgucaggcuacgguccuuggugaggucuucagaucccgcaggcuggcccguggccagcaggggugacggucgcagcagggggucaggcagcagcucuagccgagggcgcuugcuuucaaugaacuccaucucugacuuccccagcucgggcagguaugagugggacucuggccgcagguggagcuccugggaccguucauucccgggcuggaacucagacagcagggagggccuccgccgcuggggcuggaugauggagccgggcgacaggugggaggcauagucgcgggaguggugcugguacuccaggagcccgacguccgugugcguccgggcgaucugcacuggguaggaaaggcuguggggcggguagcggggcucaguggcccuccacgucugugccacaggcuguguggaucccgacaugguggugggggucggcggggagcugcucccaggccccaauaagcuuucucuuaaucaccaccaaggauuaaaagccaguccucgucaucagcucacgggccaccccgucacuggcaccagaaacugccuccagcgaggcuguguccucaaagacucagggagaccucgcggagguggcagcgguggcgcccgggcuuggggcgcgcucgggccgccggggcgcucaggcaaguggcggugccgaucgggcugggggcgcgcagcaggcccggccucgggucgggacgcgauccucccgccgccgccuccuagggcgccggc

SEQ ID NO: 2221 - RNA, 3567 nt, Homo sapiens
ucccauuuuuuuaaacguuuauuacuucaagagugaauuauuuuucaaagaugauaaaacucauuucuauuccaguagaaaagggucacagguuugccccaggguccaggagcgcccggaaggcagggcccccaggccucuucaccucagccugggcaccuauaaucugagggacccugugagggggugggggcagcucgggggcacagccugcggccacuucggccagagaguggccggcucaguccauaggaugaugucaguuuaggcuggaggaaaagggcgccagacaacccgaugcagugccugugaagacuucggggggaucaaaguccggccggggugggcggagacccucgggcagcugcacagggcaucuugugcucacuccauuguuuuccgaggccuguguaaaggcgcuuugccuggccuggcagguagaccaaggccaaagcucguggccagggccugggcacugaguccccacugaauuuggcacaggaaggcggcacucccagccuggcccguccugcauggggagccaccacaccgggacugcaguguuucaccuuggaggggaggaagccugggcccaacggcugaacgggacaggccaggcucacccgaggaaggggacgcaggacccacagccccuguggucaggccugugggccacguggagagaagguuccagaacagugcuuguugacgagccucucccuacaagucccuucagcagcagcuccaucccugagugucugcacaagccugcacgcauguguguaugugugccagggcgugugugcaggugugcaacaggcacauggcagcugggaggcucaggcuguggggcuggggggcuguccgcugggagaguccgggagaagcgggguguaggggcuggggggccggucaggcccagcggccaggccuggcuggcucacgguguccucaggacccugugcccccuccaagggagggucccaggccuuccagaacaggcagaguaguggcaacgcggcaugcaaaagacgcaagcgugcugcgcagcccccagcagugaccgcucccacuccggcagagacgcaggacugcugcuggaggugggcuccaggcugcgguuggccagaggguccgaucugaggccccuuucccccagcaggcaagcgaauggcugucagcccgggcugcccucuggccagcaccuacuuggcuccggauuuggcagaugacagggaccagcagcaggacgcagcccagcgccaggaggacguacugggcauagugcaucaccuugggcaucaacaccagcugaguguagaaugugugaagagucucccccuccauggccccgcucucugcaaaccagagcagcggcaggaccacaggcucaaucuucccaguuuguccaaugccugcgacagauuucauguagaggcucagcugcaguuucacagagcaguucauggggauucccgugaccggguggauguccaggaacaaggagugugccuccugguuagggugcaggccagucaccgcuucugccagaaccgggucagcguugaggaagugaggaugggagagaaacaagggggcacugaaccugcaggugcugacguucugaauuccagacuccaggcacgggcagaagccuucguuggguggguagauggacccguuggcaaacaggguuuugggagccacgaagcgauagguggggaugccuucaaacaccccugacuccuuguacauuagcuucauggaucggcaggccuccgggcuguagaacuccagcgaggacucaggagucaugaagggcggccacauuugcccagaaguuccauugaucauguugcacugaucggaaugccagaagucaaccuugcucagcccguuccacuuguccacgagguggauccugcugauguucuggacccccgugaacaccgugaagagcccagagucggaguuguugagcucagcaaauaauccgaacuuguccuugaaggggaacaugccuggaaaguacuuguugaugagauucacaaggggguccuuguagccccacaugaucucacccacagugcgguucaugaaggcacguucgccgaggguggugaaugccaaggucaugaugagcuucagggucaugggcuuauucuccaucaucaccgccgcacccaagaccaggauguugggcaugacgauguagucgcucuccgagccgugggacuuggagggcuggaacuggaaggugcgguacucgaggaaggacacggugucguuguuguugaaggugauguugcuuuugugccugaacucccuguacacguagggcccgcgcucccgcaccugcggcuucucgcccuucaggaucucgcugggguucaugacgucaaagaaguagacggagagauagaaggggauagggaucuccuuccacauguugaaggacaggcuacuggggucgaugcgcacguucagcuccaccuggggccccaggccuuccagaauccgaugugcagcuucagccuucuuccgguucucgucguagaugaucugcaccaggcugcggugcuucgacucgaugggcggcggugacacgggcuucucaggcucgggcggcuuggcagccuccuccuccagcuguugcugcuucuucuucagcuuagagaucugcugcucuaccauggugaucucucgguccacgcgguccauguucuggaucagcuccuccuuggacagccguggcggcaccagcuccagcucagggucagugugcggggggcuggggggagacaccgguuccagcuugcccgucaggcuacgguccuuggugaggucuucagaucccgcaggcuggcccguggccagcaggggugacggucgcagcagggggucaggcagcagcucuagccgagggcgcuugcuuucaaugaacuccaucucugacuuccccagcucgggcagguaugagugggacucuggccgcagguggagcuccugggaccguucauucccgggcuggaacucagacagcagggagggccuccgccgcuggggcuggaugauggagccgggcgacaggugggaggcauagucgcgggaguggugcugguacuccaggagcccgacguccgugugcguccgggcgaucugcacuggguaggaaaggcuguggggcggguagcggggcucaguggcccuccacgucugugccacaggcuguguggaucccgacaugguggugggggucggcggggagcugcucccaggccccaauaagcuuucucuuaaucaccaccaaggauuaaaagccaguccucgucaucagcucacgggccaccccgucacuggcaccagaaacugccuccagcgaggcuguguccucaaagacucagggagaccucgcggagguggcagcgguggcgcccgggcuuggggcgcgcucgggccgccggggcgcucaggcaaguggcggugccgaucgggcugggggcgcgcagcaggcccggccucgggucgggacgcgauccucccgccgccgccuccuagggcgccggc

SEQ ID NO: 2222 - RNA, 3362 nt, Homo sapiens
ucccauuuuuuuaaacguuuauuacuucaagagugaauuauuuuucaaagaugauaaaacucauuucuauuccaguagaaaagggucacagguuugccccaggguccaggagcgcccggaaggcagggcccccaggccucuucaccucagccugggcaccuauaaucugagggacccugugagggggugggggcagcucgggggcacagccugcggccacuucggccagagaguggccggcucaguccauaggaugaugucaguuuaggcuggaggaaaagggcgccagacaacccgaugcagugccugugaagacuucggggggaucaaaguccggccggggugggcggagacccucgggcagcugcacagggcaucuugugcucacuccauuguuuuccgaggccuguguaaaggcgcuuugccuggccuggcagguagaccaaggccaaagcucguggccagggccugggcacugaguccccacugaauuuggcacaggaaggcggcacucccagccuggcccguccugcauggggagccaccacaccgggacugcaguguuucaccuuggaggggaggaagccugggcccaacggcugaacgggacaggccaggcucacccgaggaaggggacgcaggacccacagccccuguggucaggccugugggccacguggagagaagguuccagaacagugcuuguugacgagccucucccuacaagucccuucagcagcagcuccaucccugagugucugcacaagccugcacgcauguguguaugugugccagggcgugugugcaggugugcaacaggcacauggcagcugggaggcucaggcuguggggcuggggggcuguccgcugggagaguccgggagaagcgggguguaggggcuggggggccggucaggcccagcggccaggccuggcuggcucacgguguccucaggacccuacaguuuugcuuccugcagcacagagcccuugggagcugaugucaucagggauucagaauaggccugaauggccuccuuauccuuugagcccuuuuuacuacuacuccaaaauaaauagcauuucuccuugggcaucaacaccagcugaguguagaaugugugaagagucucccccuccauggccccgcucucugcaaaccagagcagcggcaggaccacaggcucaaucuucccaguuuguccaaugccugcgacagauuucauguagaggcucagcugcaguuucacagagcaguucauggggauucccgugaccggguggauguccaggaacaaggagugugccuccugguuagggugcaggccagucaccgcuucugccagaaccgggucagcguugaggaagugaggaugggagagaaacaagggggcacugaaccugcaggugcugacguucugaauuccagacuccaggcacgggcagaagccuucguuggguggguagauggacccguuggcaaacaggguuuugggagccacgaagcgauagguggggaugccuucaaacaccccugacuccuuguacauuagcuucauggaucggcaggccuccgggcuguagaacuccagcgaggacucaggagucaugaagggcggccacauuugcccagaaguuccauugaucauguugcacugaucggaaugccagaagucaaccuugcucagcccguuccacuuguccacgagguggauccugcugauguucuggacccccgugaacaccgugaagagcccagagucggaguuguugagcucagcaaauaauccgaacuuguccuugaaggggaacaugccuggaaaguacuuguugaugagauucacaaggggguccuuguagccccacaugaucucacccacagugcgguucaugaaggcacguucgccgaggguggugaaugccaaggucaugaugagcuucagggucaugggcuuauucuccaucaucaccgccgcacccaagaccaggauguugggcaugacgauguagucgcucuccgagccgugggacuuggagggcuggaacuggaaggugcgguacucgaggaaggacacggugucguuguuguugaaggugauguugcuuuugugccugaacucccuguacacguagggcccgcgcucccgcaccugcggcuucucgcccuucaggaucucgcugggguucaugacgucaaagaaguagacggagagauagaaggggauagggaucuccuuccacauguugaaggacaggcuacuggggucgaugcgcacguucagcuccaccuggggccccaggccuuccagaauccgaugugcagcuucagccuucuuccgguucucgucguagaugaucugcaccaggcugcggugcuucgacucgaugggcggcggugacacgggcuucucaggcucgggcggcuuggcagccuccuccuccagcuguugcugcuucuucuucagcuuagagaucugcugcucuaccauggugaucucucgguccacgcgguccauguucuggaucagcuccuccuuggacagccguggcggcaccagcuccagcucagggucagugugcggggggcuggggggagacaccgguuccagcuugcccgucaggcuacgguccuuggugaggucuucagaucccgcaggcuggcccguggccagcaggggugacggucgcagcagggggucaggcagcagcucuagccgagggcgcuugcuuucaaugaacuccaucucugacuuccccagcucgggcagguaugagugggacucuggccgcagguggagcuccugggaccguucauucccgggcuggaacucagacagcagggagggccuccgccgcuggggcuggaugauggagccgggcgacaggugggaggcauagucgcgggaguggugcugguacuccaggagcccgacguccgugugcguccgggcgaucugcacuggguaggaaaggcuguggggcggguagcggggcucaguggcccuccacgucugugccacaggcuguguggaucccgacaugguggugggggucggcggggagcugcucccaggccccaauaagcuuucucuuaaucaccaccaaggauuaaaagccaguccucgucaucagcucacgggccaccccgucacuggcaccagaaacugccuccagcgaggcuguguccucaaagacucagggagaccucgcggagguggcagcgguggcgcccgggcuuggggcgcgcucgggccgccggggcgcucaggcaaguggcggugccgaucgggcugggggcgcgcagcaggcccggccucgggucgggacgcgauccucccgccgccgccuccuagggcgccggc

SEQ ID NO: 2223 - RNA, 3317 nt, Homo sapiens
ucccauuuuuuuaaacguuuauuacuucaagagugaauuauuuuucaaagaugauaaaacucauuucuauuccaguagaaaagggucacagguuugccccaggguccaggagcgcccggaaggcagggcccccaggccucuucaccucagccugggcaccuauaaucugagggacccugugagggggugggggcagcucgggggcacagccugcggccacuucggccagagaguggccggcucaguccauaggaugaugucaguuuaggcuggaggaaaagggcgccagacaacccgaugcagugccugugaagacuucggggggaucaaaguccggccggggugggcggagacccucgggcagcugcacagggcaucuugugcucacuccauuguuuuccgaggccuguguaaaggcgcuuugccuggccuggcagguagaccaaggccaaagcucguggccagggccugggcacugaguccccacugaauuuggcacaggaaggcggcacucccagccuggcccguccugcauggggagccaccacaccgggacugcaguguuucaccuuggaggggaggaagccugggcccaacggcugaacgggacaggccaggcucacccgaggaaggggacgcaggacccacagccccuguggucaggccugugggccacguggagagaagguuccagaacagugcuuguugacgagccucucccuacaagucccuucagcagcagcuccaucccugagugucugcacaagccugcacgcauguguguaugugugccagggcgugugugcaggugugcaacaggcacauggcagcugggaggcucaggcuguggggcuggggggcuguccgcugggagaguccgggagaagcgggguguaggggcuggggggccggucaggcccagcggccaggccuggcuggcucacgguguccucaggaccuuggcuccggauuuggcagaugacagggaccagcagcaggacgcagcccagcgccaggaggacguacugggcauagugcaucaccuugggcaucaacaccagcugaguguagaaugugugaagagucucccccuccauggccccgcucucugcaaaccagagcagcggcaggaccacaggcucaaucuucccaguuuguccaaugccugcgacagauuucauguagaggcucagcugcaguuucacagagcaguucauggggauucccgugaccggguggauguccaggaacaaggagugugccuccugguuagggugcaggccagucaccgcuucugccagaaccgggucagcguugaggaagugaggaugggagagaaacaagggggcacugaaccugcaggugcugacguucugaauuccagacuccaggcacgggcagaagccuucguuggguggguagauggacccguuggcaaacaggguuuugggagccacgaagcgauagguggggaugccuucaaacaccccugacuccuuguacauuagcuucauggaucggcaggccuccgggcuguagaacuccagcgaggacucaggagucaugaagggcggccacauuugcccagaaguuccauugaucauguugcacugaucggaaugccagaagucaaccuugcucagcccguuccacuuguccacgagguggauccugcugauguucuggacccccgugaacaccgugaagagcccagagucggaguuguugagcucagcaaauaauccgaacuuguccuugaaggggaacaugccuggaaaguacuuguugaugagauucacaaggggguccuuguagccccacaugaucucacccacagugcgguucaugaaggcacguucgccgaggguggugaaugccaaggucaugaugagcuucagggucaugggcuuauucuccaucaucaccgccgcacccaagaccaggauguugggcaugacgauguagucgcucuccgagccgugggacuuggagggcuggaacuggaaggugcgguacucgaggaaggacacggugucguuguuguugaaggugauguugcuuuugugccugaacucccuguacacguagggcccgcgcucccgcaccugcggcuucucgcccuucaggaucucgcugggguucaugacgucaaagaaguagacggagagauagaaggggauagggaucuccuuccacauguugaaggacaggcuacuggggucgaugcgcacguucagcuccaccuggggccccaggccuuccagaauccgaugugcagcuucagccuucuuccgguucucgucguagaugaucugcaccaggcugcggugcuucgacucgaugggcggcggugacacgggcuucucaggcucgggcggcuuggcagccuccuccuccagcuguugcugcuucuucuucagcuuagagaucugcugcucuaccauggugaucucucgguccacgcgguccauguucuggaucagcuccuccuuggacagccguggcggcaccagcuccagcucagggucagugugcggggggcuggggggagacaccgguuccagcuugcccgucaggcuacgguccuuggugaggucuucagaucccgcaggcuggcccguggccagcaggggugacggucgcagcagggggucaggcagcagcucuagccgagggcgcuugcuuucaaugaacuccaucucugacuuccccagcucgggcagguaugagugggacucuggccgcagguggagcuccugggaccguucauucccgggcuggaacucagacagcagggagggccuccgccgcuggggcuggaugauggagccgggcgacaggugggaggcauagucgcgggaguggugcugguacuccaggagcccgacguccgugugcguccgggcgaucugcacuggguaggaaaggcuguggggcggguagcggggcucaguggcccuccacgucugugccacaggcuguguggaucccgacaugguggugggggucggcggggagcugcucccaggccccaauaagcuuucucuuaaucaccaccaaggauuaaaagccaguccucgucaucagcucacgggccaccccgucacuggcaccagaaacugccuccagcgaggcuguguccucaaagacucagggagaccucgcggagguggcagcgguggcgcccgggcuuggggcgcgcucgggccgccggggcgcucaggcaaguggcggugccgaucgggcugggggcgcgcagcaggcccggccucgggucgggacgcgauccucccgccgccgccuccuagggcgccggc

SEQ ID NO: 2224 - RNA, 3462 nt, Homo sapiens
ucccauuuuuuuaaacguuuauuacuucaagagugaauuauuuuucaaagaugauaaaacucauuucuauuccaguagaaaagggucacagguuugccccaggguccaggagcgcccggaaggcagggcccccaggccucuucaccucagccugggcaccuauaaucugagggacccugugagggggugggggcagcucgggggcacagccugcggccacuucggccagagaguggccggcucaguccauaggaugaugucaguuuaggcuggaggaaaagggcgccagacaacccgaugcagugccugugaagacuucggggggaucaaaguccggccggggugggcggagacccucgggcagcugcacagggcaucuugugcucacuccauuguuuuccgaggccuguguaaaggcgcuuugccuggccuggcagguagaccaaggccaaagcucguggccagggccugggcacugaguccccacugaauuuggcacaggaaggcggcacucccagccuggcccguccugcauggggagccaccacaccgggacugcaguguuucaccuuggaggggaggaagccugggcccaacggcugaacgggacaggccaggcucacccgaggaaggggacgcaggacccacagccccuguggucaggccugugggccacguggagagaagguuccagaacagugcuuguugacgagccucucccuacaagucccuucagcagcagcuccaucccugagugucugcacaagccugcacgcauguguguaugugugccagggcgugugugcaggugugcaacaggcacauggcagcugggaggcucaggcuguggggcuggggggcuguccgcugggagaguccgggagaagcgggguguaggggcuggggggccggucaggcccagcggccaggccuggcuggcucacgguguccucaggacccugugcccccuccaagggagggucccaggccuuccagaacaggcagaguaguggcaacgcggcaugcaaaagacgcaagcgugcugcgcagcccccagcagugaccgcucccacuccggcagagacgcaggacugcugcuggaggugggcuccaggcugcgguuggccagaggguccgaucugaggccccuuucccccagcaggcaagcgaauggcugucagcccgggcugcccucuggccagcaccuacuuggcuccggauuuggcagaugacagggaccagcagcaggacgcagcccagcgccaggaggacguacugggcauagugcaucaccuugggcaucaacaccagcugaguguagaaugugugaagagucucccccuccauggccccgcucucugcaaaccagagcagcggcaggaccacaggcucaaucuucccaguuuguccaaugccugcgacagauuucauguagaggcucagcugcaguuucacagagcaguucauggggauucccgugaccggguggauguccaggaacaaggagugugccuccugguuagggugcaggccagucaccgcuucugccagaaccgggucagcguugaggaagugaggaugggagagaaacaagggggcacugaaccugcaggugcugacguucugaauuccagacuccaggcacgggcagaagccuucguuggguggguagauggacccguuggcaaacaggguuuugggagccacgaagcgauagguggggaugccuucaaacaccccugacuccuuguacauuagcuucauggaucggcaggccuccgggcuguagaacuccagcgaggacucaggagucaugaagggcggccacauuugcccagaaguuccauugaucauguugcacugaucggaaugccagaagucaaccuugcucagcccguuccacuuguccacgagguggauccugcugauguucuggacccccgugaacaccgugaagagcccagagucggaguuguugagcucagcaaauaauccgaacuuguccuugaaggggaacaugccuggaaaguacuuguugaugagauucacaaggggguccuuguagccccacaugaucucacccacagugcgguucaugaaggcacguucgccgaggguggugaaugccaaggucaugaugagcuucagggucaugggcuuauucuccaucaucaccgccgcacccaagaccaggauguugggcaugacgauguagucgcucuccgagccgugggacuuggagggcuggaacuggaaggugcgguacucgaggaaggacacggugucguuguuguugaaggugauguugcuuuugugccugaacuccauuuugauguucucaugauacugccgggugucggagggcugguuguacagcggcagcuccaccuggggccccaggccuuccagaauccgaugugcagcuucagccuucuuccgguucucgucguagaugaucugcaccaggcugcggugcuucgacucgaugggcggcggugacacgggcuucucaggcucgggcggcuuggcagccuccuccuccagcuguugcugcuucuucuucagcuuagagaucugcugcucuaccauggugaucucucgguccacgcgguccauguucuggaucagcuccuccuuggacagccguggcggcaccagcuccagcucagggucagugugcggggggcuggggggagacaccgguuccagcuugcccgucaggcuacgguccuuggugaggucuucagaucccgcaggcuggcccguggccagcaggggugacggucgcagcagggggucaggcagcagcucuagccgagggcgcuugcuuucaaugaacuccaucucugacuuccccagcucgggcagguaugagugggacucuggccgcagguggagcuccugggaccguucauucccgggcuggaacucagacagcagggagggccuccgccgcuggggcuggaugauggagccgggcgacaggugggaggcauagucgcgggaguggugcugguacuccaggagcccgacguccgugugcguccgggcgaucugcacuggguaggaaaggcuguggggcggguagcggggcucaguggcccuccacgucugugccacaggcuguguggaucccgacaugguggugggggucggcggggagcugcucccaggccccaauaagcuuucucuuaaucaccaccaaggauuaaaagccaguccucgucaucagcucacgggccaccccgucacuggcaccagaaacugccuccagcgaggcuguguccucaaagacucagggagaccucgcggagguggcagcgguggcgcccgggcuuggggcgcgcucgggccgccggggcgcucaggcaaguggcggugccgaucgggcugggggcgcgcagcaggcccggccucgggucgggacgcgauccucccgccgccgccuccuagggcgccggc

SEQ ID NO: 2225 - RNA, 4163 nt, Homo sapiens
ucccauuuuuuuaaacguuuauuacuucaagagugaauuauuuuucaaagaugauaaaacucauuucuauuccaguagaaaagggucacagguuugccccaggguccaggagcgcccggaaggcagggcccccaggccucuucaccucagccugggcaccuauaaucugagggacccugugagggggugggggcagcucgggggcacagccugcggccacuucggccagagaguggccggcucaguccauaggaugaugucaguuuaggcuggaggaaaagggcgccagacaacccgaugcagugccugugaagacuucggggggaucaaaguccggccggggugggcggagacccucgggcagcugcacagggcaucuugugcucacuccauuguuuuccgaggccuguguaaaggcgcuuugccuggccuggcagguagaccaaggccaaagcucguggccagggccugggcacugaguccccacugaauuuggcacaggaaggcggcacucccagccuggcccguccugcauggggagccaccacaccgggacugcaguguuucaccuuggaggggaggaagccugggcccaacggcugaacgggacaggccaggcucacccgaggaaggggacgcaggacccacagccccuguggucaggccugugggccacguggagagaagguuccagaacagugcuuguugacgagccucucccuacaagucccuucagcagcagcuccaucccugagugucugcacaagccugcacgcauguguguaugugugccagggcgugugugcaggugugcaacaggcacauggcagcugggaggcucaggcuguggggcuggggggcuguccgcugggagaguccgggagaagcgggguguaggggcuggggggccggucaggcccagcggccaggccuggcuggcucacgguguccucaggacccuacaguuuugcuuccugcagcacagagcccuugggagcugaugucaucagggauucagaauaggccugaauggccuccuuauccuuugagcccuuuuuacuacuacuccaaaauaaauagcauuucucuuggcuccggauuuggcagaugacagggaccagcagcaggacgcagcccagcgccaggaggacguacugggcauagugcaucaccuugggcaucaacaccagcugaguguagaaugugugaagagucucccccuccauggccccgcucucugcaaaccagagcagcggcaggaccacaggcucaaucuucccaguuuguccaaugccugcgacagauuucauguagaggcucagcugcaguuucacagagcaguucauggggauucccgugaccggguggauguccaggaacaaggagugugccuccugguuagggugcaggccagucaccgcuucugccagaaccgggucagcguugaggaagugaggaugggagagaaacaagggggcacugaaccugcaggugcugacguucugaauuccagacuccaggcacgggcagaagccuucguuggguggguagauggacccguuggcaaacaggguuuugggagccacgaagcgauagguggggaugccuucaaacaccccugacuccuuguacauuagcuucauggaucggcaggccuccgggcuguagaacuccagcgaggacucaggagucaugaagggcggccacauuugcccagaaguuccauugaucauguugcacugaucggaaugccagaagucaaccuugcucagcccguuccacuuguccacgagguggauccugcugauguucuggacccccgugaacaccgugaagagcccagagucggaguuguugagcucagcaaauaauccgaacuuguccuugaaggggaacaugccuggaaaguacuuguugaugagauucacaaggggguccuuguagccccacaugaucucacccacagugcgguucaugaaggcacguucgccgaggguggugaaugccaaggucaugaugagcuucagggucaugggcuuauucuccaucaucaccgccgcacccaagaccaggauguugggcaugacgauguagucgcucuccgagccgugggacuuggagggcuggaacuggaaggugcgguacucgaggaaggacacggugucguuguuguugaaggugauguugcuuuugugccugaacucccuguacacguagggcccgcgcucccgcaccugcggcuucucgcccuucaggaucucgcugggguucaugacgucaaagaaguagacggagagauagaaggggauagggaucuccuuccacauguugaaggacaggcuacuggggucgaugcgcacguucuggcucuugccgcggcgccgauagcuccgucucaccaggcucuuauaguucucauucuucuuagucagguaguaauagaggacgcacucagccacugucuuccucuccaggaaugaugcgaucaggccaaaguucuugggaugcugcaugaacuucucccggaaggucuccuucuccugcucacuccacauguucaugaccuggcggucuuuguacaccuucauggggucggccauaagcccguucauguugaugaacuugaugcgcugcuggucagcgucguacagcaugggcgggaucacggccagcuggcgcaucugcuucuccagguucuccugcucugagaggccaucgaugaucucugacaccucgugcucgcugcgggcggccgacauggacagcccacugccccgcuggcccacccucugcaugcgcuccugcagcucgcgcugcuugcggaucucagggaacugcuucucguaguacucgcgcaccuugcucuccuuggcccgccgccggggguuguucucgaugcgcuccaccuucuucucccaggccuccaugagcuggucauagcgcuggcagaacuucugcucccauuguuuccgagcgugauuccuccucuugaaguacaagauuagcuucuuccgcaucgccugguuuauuuugauguucucaugauacugccgggugucggagggcugguuguacagcggcagcuccaccuggggccccaggccuuccagaauccgaugugcagcuucagccuucuuccgguucucgucguagaugaucugcaccaggcugcggugcuucgacucgaugggcggcggugacacgggcuucucaggcucgggcggcuuggcagccuccuccuccagcuguugcugcuucuucuucagcuuagagaucugcugcucuaccauggugaucucucgguccacgcgguccauguucuggaucagcuccuccuuggacagccguggcggcaccagcuccagcucagggucagugugcggggggcuggggggagacaccgguuccagcuugcccgucaggcuacgguccuuggugaggucuucagaucccgcaggcuggcccguggccagcaggggugacggucgcagcagggggucaggcagcagcucuagccgagggcgcuugcuuucaaugaacuccaucucugacuuccccagcucgggcagguaugagugggacucuggccgcagguggagcuccugggaccguucauucccgggcuggaacucagacagcagggagggccuccgccgcuggggcuggaugauggagccgggcgacaggugggaggcauagucgcgggaguggugcugguacuccaggagcccgacguccgugugcguccgggcgaucugcacuggguaggaaaggcuguggggcggguagcggggcucaguggcccuccacgucugugccacaggcuguguggaucccgacaugguggugggggucggcggggagcugcucccaggccccaauaagcuuucucuuaaucaccaccaaggauuaaaagccaguccucgucaucagcucacgggccaccccgucacuggcaccagaaacugccuccagcgaggcuguguccucaaagacucagggagaccucgcggagguggcagcgguggcgcccgggcuuggggcgcgcucgggccgccggggcgcucaggcaaguggcggugccgaucgggcugggggcgcgcagcaggcccggccucgggucgggacgcgauccucccgccgccgccuccuagggcgccggc

SEQ ID NO: 2226 - RNA, 3260 nt, Homo sapiens
ucccauuuuuuuaaacguuuauuacuucaagagugaauuauuuuucaaagaugauaaaacucauuucuauuccaguagaaaagggucacagguuugccccaggguccaggagcgcccggaaggcagggcccccaggccucuucaccucagccugggcaccuauaaucugagggacccugugagggggugggggcagcucgggggcacagccugcggccacuucggccagagaguggccggcucaguccauaggaugaugucaguuuaggcuggaggaaaagggcgccagacaacccgaugcagugccugugaagacuucggggggaucaaaguccggccggggugggcggagacccucgggcagcugcacagggcaucuugugcucacuccauuguuuuccgaggccuguguaaaggcgcuuugccuggccuggcagguagaccaaggccaaagcucguggccagggccugggcacugaguccccacugaauuuggcacaggaaggcggcacucccagccuggcccguccugcauggggagccaccacaccgggacugcaguguuucaccuuggaggggaggaagccugggcccaacggcugaacgggacaggccaggcucacccgaggaaggggacgcaggacccacagccccuguggucaggccugugggccacguggagagaagguuccagaacagugcuuguugacgagccucucccuacaagucccuucagcagcagcuccaucccugagugucugcacaagccugcacgcauguguguaugugugccagggcgugugugcaggugugcaacaggcacauggcagcugggaggcucaggcuguggggcuggggggcuguccgcugggagaguccgggagaagcgggguguaggggcuggggggccggucaggcccagcggccaggccuggcuggcucacgguguccucaggaccuuggcuccggauuuggcagaugacagggaccagcagcaggacgcagcccagcgccaggaggacguacugggcauagugcaucaccuugggcaucaacaccagcugaguguagaaugugugaagagucucccccuccauggccccgcucucugcaaaccagagcagcggcaggaccacaggcucaaucuucccaguuuguccaaugccugcgacagauuucauguagaggcucagcugcaguuucacagagcaguucauggggauucccgugaccggguggauguccaggaacaaggagugugccuccugguuagggugcaggccagucaccgcuucugccagaaccgggucagcguugaggaagugaggaugggagagaaacaagggggcacugaaccugcaggugcugacguucugaauuccagacuccaggcacgggcagaagccuucguuggguggguagauggacccguuggcaaacaggguuuugggagccacgaagcgauagguggggaugccuucaaacaccccugacuccuuguacauuagcuucauggaucggcaggccuccgggcuguagaacuccagcgaggacucaggagucaugaagggcggccacauuugcccagaaguuccauugaucauguugcacugaucggaaugccagaagucaaccuugcucagcccguuccacuuguccacgagguggauccugcugauguucuggacccccgugaacaccgugaagagcccagagucggaguuguugagcucagcaaauaauccgaacuuguccuugaaggggaacaugccuggaaaguacuuguugaugagauucacaaggggguccuuguagccccacaugaucucacccacagugcgguucaugaaggcacguucgccgaggguggugaaugccaaggucaugaugagcuucagggucaugggcuuauucuccaucaucaccgccgcacccaagaccaggauguugggcaugacgauguagucgcucuccgagccgugggacuuggagggcuggaacuggaaggugcgguacucgaggaaggacacggugucguuguuguugaaggugauguugcuuuugugccugaacucccuguacacguagggcccgcgcucccgcaccugcggcuucucgcccuucaggaucucgcugggguucaugacgucaaagaaguagacggagagauagaaggggauagggaucuccuuccacauguugaaggacaggcuacuggggucgaugcgcacguuccgguucucgucguagaugaucugcaccaggcugcggugcuucgacucgaugggcggcggugacacgggcuucucaggcucgggcggcuuggcagccuccuccuccagcuguugcugcuucuucuucagcuuagagaucugcugcucuaccauggugaucucucgguccacgcgguccauguucuggaucagcuccuccuuggacagccguggcggcaccagcuccagcucagggucagugugcggggggcuggggggagacaccgguuccagcuugcccgucaggcuacgguccuuggugaggucuucagaucccgcaggcuggcccguggccagcaggggugacggucgcagcagggggucaggcagcagcucuagccgagggcgcuugcuuucaaugaacuccaucucugacuuccccagcucgggcagguaugagugggacucuggccgcagguggagcuccugggaccguucauucccgggcuggaacucagacagcagggagggccuccgccgcuggggcuggaugauggagccgggcgacaggugggaggcauagucgcgggaguggugcugguacuccaggagcccgacguccgugugcguccgggcgaucugcacuggguaggaaaggcuguggggcggguagcggggcucaguggcccuccacgucugugccacaggcuguguggaucccgacaugguggugggggucggcggggagcugcucccaggccccaauaagcuuucucuuaaucaccaccaaggauuaaaagccaguccucgucaucagcucacgggccaccccgucacuggcaccagaaacugccuccagcgaggcuguguccucaaagacucagggagaccucgcggagguggcagcgguggcgcccgggcuuggggcgcgcucgggccgccggggcgcucaggcaaguggcggugccgaucgggcugggggcgcgcagcaggcccggccucgggucgggacgcgauccucccgccgccgccuccuagggcgccggc

SEQ ID NO: 2227 - RNA, 3389 nt, Homo sapiens
ucccauuuuuuuaaacguuuauuacuucaagagugaauuauuuuucaaagaugauaaaacucauuucuauuccaguagaaaagggucacagguuugccccaggguccaggagcgcccggaaggcagggcccccaggccucuucaccucagccugggcaccuauaaucugagggacccugugagggggugggggcagcucgggggcacagccugcggccacuucggccagagaguggccggcucaguccauaggaugaugucaguuuaggcuggaggaaaagggcgccagacaacccgaugcagugccugugaagacuucggggggaucaaaguccggccggggugggcggagacccucgggcagcugcacagggcaucuugugcucacuccauuguuuuccgaggccuguguaaaggcgcuuugccuggccuggcagguagaccaaggccaaagcucguggccagggccugggcacugaguccccacugaauuuggcacaggaaggcggcacucccagccuggcccguccugcauggggagccaccacaccgggacugcaguguuucaccuuggaggggaggaagccugggcccaacggcugaacgggacaggccaggcucacccgaggaaggggacgcaggacccacagccccuguggucaggccugugggccacguggagagaagguuccagaacagugcuuguugacgagccucucccuacaagucccuucagcagcagcuccaucccugagugucugcacaagccugcacgcauguguguaugugugccagggcgugugugcaggugugcaacaggcacauggcagcugggaggcucaggcuguggggcuggggggcuguccgcugggagaguccgggagaagcgggguguaggggcuggggggccggucaggcccagcggccaggccuggcuggcucacgguguccucaggacccuacaguuuugcuuccugcagcacagagcccuugggagcugaugucaucagggauucagaauaggccugaauggccuccuuauccuuugagcccuuuuuacuacuacuccaaaauaaauagcauuucucuuggcuccggauuuggcagaugacagggaccagcagcaggacgcagcccagcgccaggaggacguacugggcauagugcaucaccuugggcaucaacaccagcugaguguagaaugugugaagagucucccccuccauggccccgcucucugcaaaccagagcagcggcaggaccacaggcucaaucuucccaguuuguccaaugccugcgacagauuucauguagaggcucagcugcaguuucacagagcaguucauggggauucccgugaccggguggauguccaggaacaaggagugugccuccugguuagggugcaggccagucaccgcuucugccagaaccgggucagcguugaggaagugaggaugggagagaaacaagggggcacugaaccugcaggugcugacguucugaauuccagacuccaggcacgggcagaagccuucguuggguggguagauggacccguuggcaaacaggguuuugggagccacgaagcgauagguggggaugccuucaaacaccccugacuccuuguacauuagcuucauggaucggcaggccuccgggcuguagaacuccagcgaggacucaggagucaugaagggcggccacauuugcccagaaguuccauugaucauguugcacugaucggaaugccagaagucaaccuugcucagcccguuccacuuguccacgagguggauccugcugauguucuggacccccgugaacaccgugaagagcccagagucggaguuguugagcucagcaaauaauccgaacuuguccuugaaggggaacaugccuggaaaguacuuguugaugagauucacaaggggguccuuguagccccacaugaucucacccacagugcgguucaugaaggcacguucgccgaggguggugaaugccaaggucaugaugagcuucagggucaugggcuuauucuccaucaucaccgccgcacccaagaccaggauguugggcaugacgauguagucgcucuccgagccgugggacuuggagggcuggaacuggaaggugcgguacucgaggaaggacacggugucguuguuguugaaggugauguugcuuuugugccugaacucccuguacacguagggcccgcgcucccgcaccugcggcuucucgcccuucaggaucucgcugggguucaugacgucaaagaaguagacggagagauagaaggggauagggaucuccuuccacauguugaaggacaggcuacuggggucgaugcgcacguuccgguucucgucguagaugaucugcaccaggcugcggugcuucgacucgaugggcggcggugacacgggcuucucaggcucgggcggcuuggcagccuccuccuccagcuguugcugcuucuucuucagcuuagagaucugcugcucuaccauggugaucucucgguccacgcgguccauguucuggaucagcuccuccuuggacagccguggcggcaccagcuccagcucagggucagugugcggggggcuggggggagacaccgguuccagcuugcccgucaggcuacgguccuuggugaggucuucagaucccgcaggcuggcccguggccagcaggggugacggucgcagcagggggucaggcagcagcucuagccgagggcgcuugcuuucaaugaacuccaucucugacuuccccagcucgggcagguaugagugggacucuggccgcagguggagcuccugggaccguucauucccgggcuggaacucagacagcagggagggccuccgccgcuggggcuggaugauggagccgggcgacaggugggaggcauagucgcgggaguggugcugguacuccaggagcccgacguccgugugcguccgggcgaucugcacuggguaggaaaggcuguggggcggguagcggggcucaguggcccuccacgucugugccacaggcuguguggaucccgacaugguggugggggucggcggggagcugcucccaggccccaauaagcuuucucuuaaucaccaccaaggauuaaaagccaguccucgucaucagcucacgggccaccccgucacuggcaccagaaacugccuccagcgaggcuguguccucaaagacucagggagaccucgcggagguggcagcgguggcgcccgggcuuggggcgcgcucgggccgccggggcgcucaggcaaguggcggugccgaucgggcugggggcgcgcagcaggcccggccucgggucgggacgcgauccucccgccgccgccuccuagggcgccggc

SEQ ID NO: 2228 - RNA, 4079 nt, Homo sapiens
ucccauuuuuuuaaacguuuauuacuucaagagugaauuauuuuucaaagaugauaaaacucauuucuauuccaguagaaaagggucacagguuugccccaggguccaggagcgcccggaaggcagggcccccaggccucuucaccucagccugggcaccuauaaucugagggacccugugagggggugggggcagcucgggggcacagccugcggccacuucggccagagaguggccggcucaguccauaggaugaugucaguuuaggcuggaggaaaagggcgccagacaacccgaugcagugccugugaagacuucggggggaucaaaguccggccggggugggcggagacccucgggcagcugcacagggcaucuugugcucacuccauuguuuuccgaggccuguguaaaggcgcuuugccuggccuggcagguagaccaaggccaaagcucguggccagggccugggcacugaguccccacugaauuuggcacaggaaggcggcacucccagccuggcccguccugcauggggagccaccacaccgggacugcaguguuucaccuuggaggggaggaagccugggcccaacggcugaacgggacaggccaggcucacccgaggaaggggacgcaggacccacagccccuguggucaggccugugggccacguggagagaagguuccagaacagugcuuguugacgagccucucccuacaagucccuucagcagcagcuccaucccugagugucugcacaagccugcacgcauguguguaugugugccagggcgugugugcaggugugcaacaggcacauggcagcugggaggcucaggcuguggggcuggggggcuguccgcugggagaguccgggagaagcgggguguaggggcuggggggccggucaggcccagcggccaggccuggcuggcucacgguguccucaggacccuacaguuuugcuuccugcagcacagagcccuugggagcugaugucaucagggauucagaauaggccugaauggccuccuuauccuuugagcccuuuuuacuacuacuccaaaauaaauagcauuucuccuugggcaucaacaccagcugaguguagaaugugugaagagucucccccuccauggccccgcucucugcaaaccagagcagcggcaggaccacaggcucaaucuucccaguuuguccaaugccugcgacagauuucauguagaggcucagcugcaguuucacagagcaguucauggggauucccgugaccggguggauguccaggaacaaggagugugccuccugguuagggugcaggccagucaccgcuucugccagaaccgggucagcguugaggaagugaggaugggagagaaacaagggggcacugaaccugcaggugcugacguucugaauuccagacuccaggcacgggcagaagccuucguuggguggguagauggacccguuggcaaacaggguuuugggagccacgaagcgauagguggggaugccuucaaacaccccugacuccuuguacauuagcuucauggaucggcaggccuccgggcuguagaacuccagcgaggacucaggagucaugaagggcggccacauuugcccagaaguuccauugaucauguugcacugaucggaaugccagaagucaaccuugcucagcccguuccacuuguccacgagguggauccugcugauguucuggacccccgugaacaccgugaagagcccagagucggaguuguugagcucagcaaauaauccgaacuuguccuugaaggggaacaugccuggaaaguacuuguugaugagauucacaaggggguccuuguagccccacaugaucucacccacagugcgguucaugaaggcacguucgccgaggguggugaaugccaaggucaugaugagcuucagggucaugggcuuauucuccaucaucaccgccgcacccaagaccaggauguugggcaugacgauguagucgcucuccgagccgugggacuuggagggcuggaacuggaaggugcgguacucgaggaaggacacggugucguuguuguugaaggugauguugcuuuugugccugaacucccuguacacguagggcccgcgcucccgcaccugcggcuucucgcccuucaggaucucgcugggguucaugacgucaaagaaguagacggagagauagaaggggauagggaucuccuuccacauguugaaggacaggcuacuggggucgaugcgcacguucuggcucuugccgcggcgccgauagcuccgucucaccaggcucuuauaguucucauucuucuuagucagguaguaauagaggacgcacucagccacugucuuccucuccaggaaugaugcgaucaggccaaaguucuugggaugcugcaugaacuucucccggaaggucuccuucuccugcucacuccacauguucaugaccuggcggucuuuguacaccuucauggggucggccauaagcccguucauguugaugaacuugaugcgcugcuggucagcgucguacagcaugggcgggaucacggccagcuggcgcaucugcuucuccagguucuccugcucugagaggccaucgaugaucucugacaccucgugcucgcugcgggcggccgacauggacagcccacugccccgcuggcccacccucugcaugcgcuccugcagcucgcgcugcuugcggaucucagggaacugcuucucguaguacucgcgcaccuugcucuccuuggcccgccgccggggguuguucucgaugcgcuccaccuucuucucccaggccuccaugagcuggucauagcgcuggcagaacuucugcucccauuguuuccgagcgugauuccuccucuugaaguacaagauuagcuucuuccgcaucgccugguuuauuuugauguucucaugauacugccgggugucggagggcugguuguacagcggcagcuccaccuggggccccaggccuuccagaauccgaugugcagcuucagccuucuuccgguucucgucguagaugaucugcaccaggcugcggugcuucgacucgaugggcggcggugacacgggcuucucaggcucgggcggcuuggcagccuccuccuccagcuguugcugcuucuucuucagcuuagagaucugcugcucuaccauggugaucucucgguccacgcgguccauguucuggaucagcuccuccuuggacagccguggcggcaccagcuccagcucagggucagugugcggggggcuggggggagacaccgguuccagcuugcccgucaggcuacgguccuuggugaggucuucagaucccgcaggcuggcccguggccagcaggggugacggucgcagcagggggucaggcagcagcucuagccgagggcgcuugcuuucaaugaacuccaucucugacuuccccagcucgggcagguaugagugggacucuggccgcagguggagcuccugggaccguucauucccgggcuggaacucagacagcagggagggccuccgccgcuggggcuggaugauggagccgggcgacaggugggaggcauagucgcgggaguggugcugguacuccaggagcccgacguccgugugcguccgggcgaucugcacuggguaggaaaggcuguggggcggguagcggggcucaguggcccuccacgucugugccacaggcuguguggaucccgacaugguggugggggucggcggggagcugcucccaggccccaauaagcuuucucuuaaucaccaccaaggauuaaaagccaguccucgucaucagcucacgggccaccccgucacuggcaccagaaacugccuccagcgaggcuguguccucaaagacucagggagaccucgcggagguggcagcgguggcgcccgggcuuggggcgcgcucgggccgccggggcgcucaggcaaguggcggugccgaucgggcugggggcgcgcagcaggcccggccucgggucgggacgcgauccucccgccgccgccuccuagggcgccggc

SEQ ID NO: 2229 - RNA, 2848 nt, Homo sapiens
gccguuuauacugauuacauguugaagugauaauacuuugcauauauuuggguuaaauaagauuaaaauuaauuccaccuguuuccuuugacuguuaaguggcuauuagaaaauuuaaacugaaaaccucacacguggcucacgcuguauuucuauuuggcucuaaccccucacagcuccuaucaugagugaaauuaucuuuucugcugauuuacuugguuuucaucugucuccccggcugggaugccagccccccucaaucccccugagcagggaucucagcugucuccucuacugcuguacguccccucgccccuaacagaaccuggcauccccgggugcugacuugaugaauggaugaugcaaguaccaggucucauuacucaaagcccaccugugcccccuccaagggagggucccaggccuuccagaacaggcagaguaguggcaacgcggcaugcaaaagacgcaagcgugcugcgcagcccccagcagugaccgcucccacuccggcagagacgcaggacugcugcuggaggugggcuccaggcugcgguuggccagaggguccgaucugaggccccuuucccccagcaggcaagcgaauggcugucagcccgggcugcccucuggccagcaccuacuuggcuccggauuuggcagaugacagggaccagcagcaggacgcagcccagcgccaggaggacguacugggcauagugcaucaccuugggcaucaacaccagcugaguguagaaugugugaagagucucccccuccauggccccgcucucugcaaaccagagcagcggcaggaccacaggcucaaucuucccaguuuguccaaugccugcgacagauuucauguagaggcucagcugcaguuucacagagcaguucauggggauucccgugaccggguggauguccaggaacaaggagugugccuccugguuagggugcaggccagucaccgcuucugccagaaccgggucagcguugaggaagugaggaugggagagaaacaagggggcacugaaccugcaggugcugacguucugaauuccagacuccaggcacgggcagaagccuucguuggguggguagauggacccguuggcaaacaggguuuugggagccacgaagcgauagguggggaugccuucaaacaccccugacuccuuguacauuagcuucauggaucggcaggccuccgggcuguagaacuccagcgaggacucaggagucaugaagggcggccacauuugcccagaaguuccauugaucauguugcacugaucggaaugccagaagucaaccuugcucagcccguuccacuuguccacgagguggauccugcugauguucuggacccccgugaacaccgugaagagcccagagucggaguuguugagcucagcaaauaauccgaacuuguccuugaaggggaacaugccuggaaaguacuuguugaugagauucacaaggggguccuuguagccccacaugaucucacccacagugcgguucaugaaggcacguucgccgaggguggugaaugccaaggucaugaugagcuucagggucaugggcuuauucuccaucaucaccgccgcacccaagaccaggauguugggcaugacgauguagucgcucuccgagccgugggacuuggagggcuggaacuggaaggugcgguacucgaggaaggacacggugucguuguuguugaaggugauguugcuuuugugccugaacuccauuuugauguucucaugauacugccgggugucggagggcugguuguacagcggcagcuccaccuggggccccaggccuuccagaauccgaugugcagcuucagccuucuuccgguucucgucguagaugaucugcaccaggcugcggugcuucgacucgaugggcggcggugacacgggcuucucaggcucgggcggcuuggcagccuccuccuccagcuguugcugcuucuucuucagcuuagagaucugcugcucuaccauggugaucucucgguccacgcgguccauguucuggaucagcuccuccuuggacagccguggcggcaccagcuccagcucagggucagugugcggggggcuggggggagacaccgguuccagcuugcccgucaggcuacgguccuuggugaggucuucagaucccgcaggcuggcccguggccagcaggggugacggucgcagcagggggucaggcagcagcucuagccgagggcgcuugcuuucaaugaacuccaucucugacuuccccagcucgggcagguaugagugggacucuggccgcagguggagcuccugggaccguucauucccgggcuggaacucagacagcagggagggccuccgccgcuggggcuggaugauggagccgggcgacaggugggaggcauagucgcgggaguggugcugguacuccaggagcccgacguccgugugcguccgggcgaucugcacuggguaggaaaggcuguggggcggguagcggggcucaguggcccuccacgucugugccacaggcuguguggaucccgacaugguggugggggucggcggggagcugcucccaggccccaauaagcuuucucuuaaucaccaccaaggauuaaaagccaguccucgucaucagcucacgggccaccccgucacuggcacccgagcacaugaccaaccucgcucacgucagcuccaaacacaacuugaaguaacucucucacaagaaaaaaaaagaaaaagaaaaaaagugccagccagcgggccagcagaguccacacacacaggcugugcugccggcuuccaggaggcacacc

SEQ ID NO: 2230 - RNA, 4284 nt, Homo sapiens
ucccauuuuuuuaaacguuuauuacuucaagagugaauuauuuuucaaagaugauaaaacucauuucuauuccaguagaaaagggucacagguuugccccaggguccaggagcgcccggaaggcagggcccccaggccucuucaccucagccugggcaccuauaaucugagggacccugugagggggugggggcagcucgggggcacagccugcggccacuucggccagagaguggccggcucaguccauaggaugaugucaguuuaggcuggaggaaaagggcgccagacaacccgaugcagugccugugaagacuucggggggaucaaaguccggccggggugggcggagacccucgggcagcugcacagggcaucuugugcucacuccauuguuuuccgaggccuguguaaaggcgcuuugccuggccuggcagguagaccaaggccaaagcucguggccagggccugggcacugaguccccacugaauuuggcacaggaaggcggcacucccagccuggcccguccugcauggggagccaccacaccgggacugcaguguuucaccuuggaggggaggaagccugggcccaacggcugaacgggacaggccaggcucacccgaggaaggggacgcaggacccacagccccuguggucaggccugugggccacguggagagaagguuccagaacagugcuuguugacgagccucucccuacaagucccuucagcagcagcuccaucccugagugucugcacaagccugcacgcauguguguaugugugccagggcgugugugcaggugugcaacaggcacauggcagcugggaggcucaggcuguggggcuggggggcuguccgcugggagaguccgggagaagcgggguguaggggcuggggggccggucaggcccagcggccaggccuggcuggcucacgguguccucaggacccugugcccccuccaagggagggucccaggccuuccagaacaggcagaguaguggcaacgcggcaugcaaaagacgcaagcgugcugcgcagcccccagcagugaccgcucccacuccggcagagacgcaggacugcugcuggaggugggcuccaggcugcgguuggccagaggguccgaucugaggccccuuucccccagcaggcaagcgaauggcugucagcccgggcugcccucuggccagcaccuacuuggcuccggauuuggcagaugacagggaccagcagcaggacgcagcccagcgccaggaggacguacugggcauagugcaucaccuugggcaucaacaccagcugaguguagaaugugugaagagucucccccuccauggccccgcucucugcaaaccagagcagcggcaggaccacaggcucaaucuucccaguuuguccaaugccugcgacagauuucauguagaggcucagcugcaguuucacagagcaguucauggggauucccgugaccggguggauguccaggaacaaggagugugccuccugguuagggugcaggccagucaccgcuucugccagaaccgggucagcguugaggaagugaggaugggagagaaacaagggggcacugaaccugcaggugcugacguucugaauuccagacuccaggcacgggcagaagccuucguuggguggguagauggacccguuggcaaacaggguuuugggagccacgaagcgauagguggggaugccuucaaacaccccugacuccuuguacauuagcuucauggaucggcaggccuccgggcuguagaacuccagcgaggacucaggagucaugaagggcggccacauuugcccagaaguuccauugaucauguugcacugaucggaaugccagaagucaaccuugcucagcccguuccacuuguccacgagguggauccugcugauguucuggacccccgugaacaccgugaagagcccagagucggaguuguugagcucagcaaauaauccgaacuuguccuugaaggggaacaugccuggaaaguacuuguugaugagauucacaaggggguccuuguagccccacaugaucucacccacagugcgguucaugaaggcacguucgccgaggguggugaaugccaaggucaugaugagcuucagggucaugggcuuauucuccaucaucaccgccgcacccaagaccaggauguugggcaugacgauguagucgcucuccgagccgugggacuuggagggcuggaacuggaaggugcgguacucgaggaaggacacggugucguuguuguugaaggugauguugcuuuugugccugaacucccuguacacguagggcccgcgcucccgcaccugcggcuucucgcccuucaggaucucgcugggguucaugacgucaaagaaguagacggagagauagaaggggauagggaucuccuuccacauguugaaggacaggcuacuggggucgaugcgcacguucuggcucuugccgcggcgccgauagcuccgucucaccaggcucuuauaguucucauucuucuuagucagguaguaauagaggacgcacucagccacugucuuccucuccaggaaugaugcgaucaggccaaaguucuugggaugcugcaugaacuucucccggaaggucuccuucuccugcucacuccacauguucaugaccuggcggucuuuguacaccuucauggggucggccauaagcccguucauguugaugaacuugaugcgcugcuggucagcgucguacagcaugggcgggaucacggccagcuggcgcaucugcuucuccagguucuccugcucugagaggccaucgaugaucucugacaccucgugcucgcugcgggcggccgacauggacagcccacugccccgcuggcccacccucugcaugcgcuccugcagcucgcgcugcuugcggaucucagggaacugcuucucguaguacucgcgcaccuugcucuccuuggcccgccgccggggguuguucucgaugcgcuccaccuucuucucccaggccuccaugagcuggucauagcgcuggcagaacuucugcucccauuguuuccgagcgugauuccuccucuugaaguacaagauuagcuucuuccgcaucgccugguuuauuuugauguucucaugauacugccgggugucggagggcugguuguacagcggcagcuccaccuggggccccaggccuuccagaauccgaugugcagcuucagccuucuuccgguucucgucguagaugaucugcaccaggcugcggugcuucgacucgaugggcggcggugacacgggcuucucaggcucgggcggcuuggcagccuccuccuccagcuguugcugcuucuucuucagcuuagagaucugcugcucuaccauggugaucucucgguccacgcgguccauguucuggaucagcuccuccuuggacagccguggcggcaccagcuccagcucagggucagugugcggggggcuggggggagacaccgguuccagcuugcccgucaggcuacgguccuuggugaggucuucagaucccgcaggcuggcccguggccagcaggggugacggucgcagcagggggucaggcagcagcucuagccgagggcgcuugcuuucaaugaacuccaucucugacuuccccagcucgggcagguaugagugggacucuggccgcagguggagcuccugggaccguucauucccgggcuggaacucagacagcagggagggccuccgccgcuggggcuggaugauggagccgggcgacaggugggaggcauagucgcgggaguggugcugguacuccaggagcccgacguccgugugcguccgggcgaucugcacuggguaggaaaggcuguggggcggguagcggggcucaguggcccuccacgucugugccacaggcuguguggaucccgacaugguggugggggucggcggggagcugcucccaggccccaauaagcuuucucuuaaucaccaccaaggauuaaaagccaguccucgucaucagcucacgggccaccccgucacuggcaccagaaacugccuccagcgaggcuguguccucaaagacucagggagaccucgcggagguggcagcgguggcgcccgggcuuggggcgcgcucgggccgccggggcgcucaggcaaguggcggugccgaucgggcugggggcgcgcagcaggcccggccucgggucgggacgcgauccucccgccgccgccuccuagggcgccggc

SEQ ID NO: 2231 - RNA, 3510 nt, Homo sapiens
ucccauuuuuuuaaacguuuauuacuucaagagugaauuauuuuucaaagaugauaaaacucauuucuauuccaguagaaaagggucacagguuugccccaggguccaggagcgcccggaaggcagggcccccaggccucuucaccucagccugggcaccuauaaucugagggacccugugagggggugggggcagcucgggggcacagccugcggccacuucggccagagaguggccggcucaguccauaggaugaugucaguuuaggcuggaggaaaagggcgccagacaacccgaugcagugccugugaagacuucggggggaucaaaguccggccggggugggcggagacccucgggcagcugcacagggcaucuugugcucacuccauuguuuuccgaggccuguguaaaggcgcuuugccuggccuggcagguagaccaaggccaaagcucguggccagggccugggcacugaguccccacugaauuuggcacaggaaggcggcacucccagccuggcccguccugcauggggagccaccacaccgggacugcaguguuucaccuuggaggggaggaagccugggcccaacggcugaacgggacaggccaggcucacccgaggaaggggacgcaggacccacagccccuguggucaggccugugggccacguggagagaagguuccagaacagugcuuguugacgagccucucccuacaagucccuucagcagcagcuccaucccugagugucugcacaagccugcacgcauguguguaugugugccagggcgugugugcaggugugcaacaggcacauggcagcugggaggcucaggcuguggggcuggggggcuguccgcugggagaguccgggagaagcgggguguaggggcuggggggccggucaggcccagcggccaggccuggcuggcucacgguguccucaggacccugugcccccuccaagggagggucccaggccuuccagaacaggcagaguaguggcaacgcggcaugcaaaagacgcaagcgugcugcgcagcccccagcagugaccgcucccacuccggcagagacgcaggacugcugcuggaggugggcuccaggcugcgguuggccagaggguccgaucugaggccccuuucccccagcaggcaagcgaauggcugucagcccgggcugcccucuggccagcaccuacuuggcuccggauuuggcagaugacagggaccagcagcaggacgcagcccagcgccaggaggacguacugggcauagugcaucaccuugggcaucaacaccagcugaguguagaaugugugaagagucucccccuccauggccccgcucucugcaaaccagagcagcggcaggaccacaggcucaaucuucccaguuuguccaaugccugcgacagauuucauguagaggcucagcugcaguuucacagagcaguucauggggauucccgugaccggguggauguccaggaacaaggagugugccuccugguuagggugcaggccagucaccgcuucugccagaaccgggucagcguugaggaagugaggaugggagagaaacaagggggcacugaaccugcaggugcugacguucugaauuccagacuccaggcacgggcagaagccuucguuggguggguagauggacccguuggcaaacaggguuuugggagccacgaagcgauagguggggaugccuucaaacaccccugacuccuuguacauuagcuucauggaucggcaggccuccgggcuguagaacuccagcgaggacucaggagucaugaagggcggccacauuugcccagaaguuccauugaucauguugcacugaucggaaugccagaagucaaccuugcucagcccguuccacuuguccacgagguggauccugcugauguucuggacccccgugaacaccgugaagagcccagagucggaguuguugagcucagcaaauaauccgaacuuguccuugaaggggaacaugccuggaaaguacuuguugaugagauucacaaggggguccuuguagccccacaugaucucacccacagugcgguucaugaaggcacguucgccgaggguggugaaugccaaggucaugaugagcuucagggucaugggcuuauucuccaucaucaccgccgcacccaagaccaggauguugggcaugacgauguagucgcucuccgagccgugggacuuggagggcuggaacuggaaggugcgguacucgaggaaggacacggugucguuguuguugaaggugauguugcuuuugugccugaacucccuguacacguagggcccgcgcucccgcaccugcggcuucucgcccuucaggaucucgcugggguucaugacgucaaagaaguagacggagagauagaaggggauagggaucuccuuccacauguugaaggacaggcuacuggggucgaugcgcacguuccgguucucgucguagaugaucugcaccaggcugcggugcuucgacucgaugggcggcggugacacgggcuucucaggcucgggcggcuuggcagccuccuccuccagcuguugcugcuucuucuucagcuuagagaucugcugcucuaccauggugaucucucgguccacgcgguccauguucuggaucagcuccuccuuggacagccguggcggcaccagcuccagcucagggucagugugcggggggcuggggggagacaccgguuccagcuugcccgucaggcuacgguccuuggugaggucuucagaucccgcaggcuggcccguggccagcaggggugacggucgcagcagggggucaggcagcagcucuagccgagggcgcuugcuuucaaugaacuccaucucugacuuccccagcucgggcagguaugagugggacucuggccgcagguggagcuccugggaccguucauucccgggcuggaacucagacagcagggagggccuccgccgcuggggcuggaugauggagccgggcgacaggugggaggcauagucgcgggaguggugcugguacuccaggagcccgacguccgugugcguccgggcgaucugcacuggguaggaaaggcuguggggcggguagcggggcucaguggcccuccacgucugugccacaggcuguguggaucccgacaugguggugggggucggcggggagcugcucccaggccccaauaagcuuucucuuaaucaccaccaaggauuaaaagccaguccucgucaucagcucacgggccaccccgucacuggcaccagaaacugccuccagcgaggcuguguccucaaagacucagggagaccucgcggagguggcagcgguggcgcccgggcuuggggcgcgcucgggccgccggggcgcucaggcaaguggcggugccgaucgggcugggggcgcgcagcaggcccggccucgggucgggacgcgauccucccgccgccgccuccuagggcgccggc

SEQ ID NO: 2232 - RNA, 4034 nt, Homo sapiens
ucccauuuuuuuaaacguuuauuacuucaagagugaauuauuuuucaaagaugauaaaacucauuucuauuccaguagaaaagggucacagguuugccccaggguccaggagcgcccggaaggcagggcccccaggccucuucaccucagccugggcaccuauaaucugagggacccugugagggggugggggcagcucgggggcacagccugcggccacuucggccagagaguggccggcucaguccauaggaugaugucaguuuaggcuggaggaaaagggcgccagacaacccgaugcagugccugugaagacuucggggggaucaaaguccggccggggugggcggagacccucgggcagcugcacagggcaucuugugcucacuccauuguuuuccgaggccuguguaaaggcgcuuugccuggccuggcagguagaccaaggccaaagcucguggccagggccugggcacugaguccccacugaauuuggcacaggaaggcggcacucccagccuggcccguccugcauggggagccaccacaccgggacugcaguguuucaccuuggaggggaggaagccugggcccaacggcugaacgggacaggccaggcucacccgaggaaggggacgcaggacccacagccccuguggucaggccugugggccacguggagagaagguuccagaacagugcuuguugacgagccucucccuacaagucccuucagcagcagcuccaucccugagugucugcacaagccugcacgcauguguguaugugugccagggcgugugugcaggugugcaacaggcacauggcagcugggaggcucaggcuguggggcuggggggcuguccgcugggagaguccgggagaagcgggguguaggggcuggggggccggucaggcccagcggccaggccuggcuggcucacgguguccucaggaccuuggcuccggauuuggcagaugacagggaccagcagcaggacgcagcccagcgccaggaggacguacugggcauagugcaucaccuugggcaucaacaccagcugaguguagaaugugugaagagucucccccuccauggccccgcucucugcaaaccagagcagcggcaggaccacaggcucaaucuucccaguuuguccaaugccugcgacagauuucauguagaggcucagcugcaguuucacagagcaguucauggggauucccgugaccggguggauguccaggaacaaggagugugccuccugguuagggugcaggccagucaccgcuucugccagaaccgggucagcguugaggaagugaggaugggagagaaacaagggggcacugaaccugcaggugcugacguucugaauuccagacuccaggcacgggcagaagccuucguuggguggguagauggacccguuggcaaacaggguuuugggagccacgaagcgauagguggggaugccuucaaacaccccugacuccuuguacauuagcuucauggaucggcaggccuccgggcuguagaacuccagcgaggacucaggagucaugaagggcggccacauuugcccagaaguuccauugaucauguugcacugaucggaaugccagaagucaaccuugcucagcccguuccacuuguccacgagguggauccugcugauguucuggacccccgugaacaccgugaagagcccagagucggaguuguugagcucagcaaauaauccgaacuuguccuugaaggggaacaugccuggaaaguacuuguugaugagauucacaaggggguccuuguagccccacaugaucucacccacagugcgguucaugaaggcacguucgccgaggguggugaaugccaaggucaugaugagcuucagggucaugggcuuauucuccaucaucaccgccgcacccaagaccaggauguugggcaugacgauguagucgcucuccgagccgugggacuuggagggcuggaacuggaaggugcgguacucgaggaaggacacggugucguuguuguugaaggugauguugcuuuugugccugaacucccuguacacguagggcccgcgcucccgcaccugcggcuucucgcccuucaggaucucgcugggguucaugacgucaaagaaguagacggagagauagaaggggauagggaucuccuuccacauguugaaggacaggcuacuggggucgaugcgcacguucuggcucuugccgcggcgccgauagcuccgucucaccaggcucuuauaguucucauucuucuuagucagguaguaauagaggacgcacucagccacugucuuccucuccaggaaugaugcgaucaggccaaaguucuugggaugcugcaugaacuucucccggaaggucuccuucuccugcucacuccacauguucaugaccuggcggucuuuguacaccuucauggggucggccauaagcccguucauguugaugaacuugaugcgcugcuggucagcgucguacagcaugggcgggaucacggccagcuggcgcaucugcuucuccagguucuccugcucugagaggccaucgaugaucucugacaccucgugcucgcugcgggcggccgacauggacagcccacugccccgcuggcccacccucugcaugcgcuccugcagcucgcgcugcuugcggaucucagggaacugcuucucguaguacucgcgcaccuugcucuccuuggcccgccgccggggguuguucucgaugcgcuccaccuucuucucccaggccuccaugagcuggucauagcgcuggcagaacuucugcucccauuguuuccgagcgugauuccuccucuugaaguacaagauuagcuucuuccgcaucgccugguuuauuuugauguucucaugauacugccgggugucggagggcugguuguacagcggcagcuccaccuggggccccaggccuuccagaauccgaugugcagcuucagccuucuuccgguucucgucguagaugaucugcaccaggcugcggugcuucgacucgaugggcggcggugacacgggcuucucaggcucgggcggcuuggcagccuccuccuccagcuguugcugcuucuucuucagcuuagagaucugcugcucuaccauggugaucucucgguccacgcgguccauguucuggaucagcuccuccuuggacagccguggcggcaccagcuccagcucagggucagugugcggggggcuggggggagacaccgguuccagcuugcccgucaggcuacgguccuuggugaggucuucagaucccgcaggcuggcccguggccagcaggggugacggucgcagcagggggucaggcagcagcucuagccgagggcgcuugcuuucaaugaacuccaucucugacuuccccagcucgggcagguaugagugggacucuggccgcagguggagcuccugggaccguucauucccgggcuggaacucagacagcagggagggccuccgccgcuggggcuggaugauggagccgggcgacaggugggaggcauagucgcgggaguggugcugguacuccaggagcccgacguccgugugcguccgggcgaucugcacuggguaggaaaggcuguggggcggguagcggggcucaguggcccuccacgucugugccacaggcuguguggaucccgacaugguggugggggucggcggggagcugcucccaggccccaauaagcuuucucuuaaucaccaccaaggauuaaaagccaguccucgucaucagcucacgggccaccccgucacuggcaccagaaacugccuccagcgaggcuguguccucaaagacucagggagaccucgcggagguggcagcgguggcgcccgggcuuggggcgcgcucgggccgccggggcgcucaggcaaguggcggugccgaucgggcugggggcgcgcagcaggcccggccucgggucgggacgcgauccucccgccgccgccuccuagggcgccggc

SEQ ID NO: 2233 - RNA, 3446 nt, Homo sapiens
ucccauuuuuuuaaacguuuauuacuucaagagugaauuauuuuucaaagaugauaaaacucauuucuauuccaguagaaaagggucacagguuugccccaggguccaggagcgcccggaaggcagggcccccaggccucuucaccucagccugggcaccuauaaucugagggacccugugagggggugggggcagcucgggggcacagccugcggccacuucggccagagaguggccggcucaguccauaggaugaugucaguuuaggcuggaggaaaagggcgccagacaacccgaugcagugccugugaagacuucggggggaucaaaguccggccggggugggcggagacccucgggcagcugcacagggcaucuugugcucacuccauuguuuuccgaggccuguguaaaggcgcuuugccuggccuggcagguagaccaaggccaaagcucguggccagggccugggcacugaguccccacugaauuuggcacaggaaggcggcacucccagccuggcccguccugcauggggagccaccacaccgggacugcaguguuucaccuuggaggggaggaagccugggcccaacggcugaacgggacaggccaggcucacccgaggaaggggacgcaggacccacagccccuguggucaggccugugggccacguggagagaagguuccagaacagugcuuguugacgagccucucccuacaagucccuucagcagcagcuccaucccugagugucugcacaagccugcacgcauguguguaugugugccagggcgugugugcaggugugcaacaggcacauggcagcugggaggcucaggcuguggggcuggggggcuguccgcugggagaguccgggagaagcgggguguaggggcuggggggccggucaggcccagcggccaggccuggcuggcucacgguguccucaggacccuacaguuuugcuuccugcagcacagagcccuugggagcugaugucaucagggauucagaauaggccugaauggccuccuuauccuuugagcccuuuuuacuacuacuccaaaauaaauagcauuucucuuggcuccggauuuggcagaugacagggaccagcagcaggacgcagcccagcgccaggaggacguacugggcauagugcaucaccuugggcaucaacaccagcugaguguagaaugugugaagagucucccccuccauggccccgcucucugcaaaccagagcagcggcaggaccacaggcucaaucuucccaguuuguccaaugccugcgacagauuucauguagaggcucagcugcaguuucacagagcaguucauggggauucccgugaccggguggauguccaggaacaaggagugugccuccugguuagggugcaggccagucaccgcuucugccagaaccgggucagcguugaggaagugaggaugggagagaaacaagggggcacugaaccugcaggugcugacguucugaauuccagacuccaggcacgggcagaagccuucguuggguggguagauggacccguuggcaaacaggguuuugggagccacgaagcgauagguggggaugccuucaaacaccccugacuccuuguacauuagcuucauggaucggcaggccuccgggcuguagaacuccagcgaggacucaggagucaugaagggcggccacauuugcccagaaguuccauugaucauguugcacugaucggaaugccagaagucaaccuugcucagcccguuccacuuguccacgagguggauccugcugauguucuggacccccgugaacaccgugaagagcccagagucggaguuguugagcucagcaaauaauccgaacuuguccuugaaggggaacaugccuggaaaguacuuguugaugagauucacaaggggguccuuguagccccacaugaucucacccacagugcgguucaugaaggcacguucgccgaggguggugaaugccaaggucaugaugagcuucagggucaugggcuuauucuccaucaucaccgccgcacccaagaccaggauguugggcaugacgauguagucgcucuccgagccgugggacuuggagggcuggaacuggaaggugcgguacucgaggaaggacacggugucguuguuguugaaggugauguugcuuuugugccugaacucccuguacacguagggcccgcgcucccgcaccugcggcuucucgcccuucaggaucucgcugggguucaugacgucaaagaaguagacggagagauagaaggggauagggaucuccuuccacauguugaaggacaggcuacuggggucgaugcgcacguucagcuccaccuggggccccaggccuuccagaauccgaugugcagcuucagccuucuuccgguucucgucguagaugaucugcaccaggcugcggugcuucgacucgaugggcggcggugacacgggcuucucaggcucgggcggcuuggcagccuccuccuccagcuguugcugcuucuucuucagcuuagagaucugcugcucuaccauggugaucucucgguccacgcgguccauguucuggaucagcuccuccuuggacagccguggcggcaccagcuccagcucagggucagugugcggggggcuggggggagacaccgguuccagcuugcccgucaggcuacgguccuuggugaggucuucagaucccgcaggcuggcccguggccagcaggggugacggucgcagcagggggucaggcagcagcucuagccgagggcgcuugcuuucaaugaacuccaucucugacuuccccagcucgggcagguaugagugggacucuggccgcagguggagcuccugggaccguucauucccgggcuggaacucagacagcagggagggccuccgccgcuggggcuggaugauggagccgggcgacaggugggaggcauagucgcgggaguggugcugguacuccaggagcccgacguccgugugcguccgggcgaucugcacuggguaggaaaggcuguggggcggguagcggggcucaguggcccuccacgucugugccacaggcuguguggaucccgacaugguggugggggucggcggggagcugcucccaggccccaauaagcuuucucuuaaucaccaccaaggauuaaaagccaguccucgucaucagcucacgggccaccccgucacuggcaccagaaacugccuccagcgaggcuguguccucaaagacucagggagaccucgcggagguggcagcgguggcgcccgggcuuggggcgcgcucgggccgccggggcgcucaggcaaguggcggugccgaucgggcugggggcgcgcagcaggcccggccucgggucgggacgcgauccucccgccgccgccuccuagggcgccggc

SEQ ID NO: 2234 - RNA, 2952 nt, Homo sapiens
ucccauuuuuuuaaacguuuauuacuucaagagugaauuauuuuucaaagaugauaaaacucauuucuauuccaguagaaaagggucacagguuugccccaggguccaggagcgcccggaaggcagggcccccaggccucuucaccucagccugggcaccuauaaucugagggacccugugagggggugggggcagcucgggggcacagccugcggccacuucggccagagaguggccggcucaguccauaggaugaugucaguuuaggcuggaggaaaagggcgccagacaacccgaugcagugccugugaagacuucggggggaucaaaguccggccggggugggcggagacccucgggcagcugcacagggcaucuugugcucacuccauuguuuuccgaggccuguguaaaggcgcuuugccuggccuggcagguagaccaaggccaaagcucguggccagggccugggcacugaguccccacugaauuuggcacaggaaggcggcacucccagccuggcccguccugcauggggagccaccacaccgggacugcaguguuucaccuuggaggggaggaagccugggcccaacggcugaacgggacaggccaggcucacccgaggaaggggacgcaggacccacagccccuguggucaggccugugggccacguggagagaagguuccagaacagugcuuguugacgagccucucccuacaagucccuucagcagcagcuccaucccugagugucugcacaagccugcacgcauguguguaugugugccagggcgugugugcaggugugcaacaggcacauggcagcugggaggcucaggcuguggggcuggggggcuguccgcugggagaguccgggagaagcgggguguaggggcuggggggccggucaggcccagcggccaggccuggcuggcucacgguguccucaggacccuuucuuggcuguuuccauuucuucuucuguccagcgagaacucucauucagcuccauggaggccagcucggcgcucugcuggggggugauggccuccucgcuguuggccucauuagccauugagcgggugaugcggccuuugcgucuucccuggcuguuggcaguuuugcggccuuuggaggccacagccuccuucucgucguuguccuccccugaggugucgucugucuucuccuugaggaggucuuccuugucguucuccaccuccggcuucuccuccuccuucuccgccuccuuuuccuucuccuucucaucuuucuccuccuggcugcugcggggcaugggcugcugcugcugcugcugcugcugcugcugcugcuguuguugcugcugcuggcucuugccgcggcgccgauagcuccgucucaccaggcucuuauaguucucauucuucuuagucagguaguaauagaggacgcacucagccacugucuuccucuccaggaaugaugcgaucaggccaaaguucuugggaugcugcaugaacuucucccggaaggucuccuucuccugcucacuccacauguucaugaccuggcggucuuuguacaccuucauggggucggccauaagcccguucauguugaugaacuugaugcgcugcuggucagcgucguacagcaugggcgggaucacggccagcuggcgcaucugcuucuccagguucuccugcucugagaggccaucgaugaucucugacaccucgugcucgcugcgggcggccgacauggacagcccacugccccgcuggcccacccugcucugcaugcgcuccugcagcucgcgcugcuugcggaucucagggaacugcuucucguaguacucgcgcaccuugcucuccuuggcccgccgccggggguuguucucgaugcgcuccaccuucuucucccaggccuccaugagcuggucauagcgcuggcagaacuucugcucccauuguuuccgagcgugauuccuccucuugaaguacaagauuagcuucuuccgcaucgccugguuuauuuugauguucucaugauacugccgggugucggagggcugguuguacagcggcagcuccaccuggggccccaggccuuccagaauccgaugugcagcuucagccuucuuccgguucucgucguagaugaucugcaccaggcugcggugcuucgacucgaugggcggcggugacacgggcuucucaggcucgggcggcuuggcagccuccuccuccagcuguugcugcuucuucuucagcuuagagaucugcugcucuaccauggugaucucucgguccacgcgguccauguucuggaucagcuccuccuuggacagccguggcggcaccagcuccagcucagggucagugugcggggggcuggggggagacaccgguuccagcuugcccgucaggcuacgguccuuggugaggucuucagaucccgcaggcuggcccguggccagcaggggugacggucgcagcagggggucaggcagcagcucuagccgagggcgcuugcuuucaaugaacuccaucucugacuuccccagcucgggcagguaugagugggacucuggccgcagguggagcuccugggaccguucauucccgggcuggaacucagacagcagggagggccuccgccgcuggggcuggaugauggagccgggcgacaggugggaggcauagucgcgggaguggugcugguacuccaggagcccgacguccgugugcguccgggcgaucugcacuggguaggaaaggcuguggggcggguagcggggcucaguggcccuccacgucugugccacaggcuguguggaucccgacaugguggugggggucggcggggagcugcucccaggccccaauaagcuuucucuuaaucaccaccaaggauuaaaagccaguccucgucaucagcucacgggccaccccgucacuggcac

SEQ ID NO: 2235 - RNA, 4037 nt, Homo sapiens
ucccauuuuuuuaaacguuuauuacuucaagagugaauuauuuuucaaagaugauaaaacucauuucuauuccaguagaaaagggucacagguuugccccaggguccaggagcgcccggaaggcagggcccccaggccucuucaccucagccugggcaccuauaaucugagggacccugugagggggugggggcagcucgggggcacagccugcggccacuucggccagagaguggccggcucaguccauaggaugaugucaguuuaggcuggaggaaaagggcgccagacaacccgaugcagugccugugaagacuucggggggaucaaaguccggccggggugggcggagacccucgggcagcugcacagggcaucuugugcucacuccauuguuuuccgaggccuguguaaaggcgcuuugccuggccuggcagguagaccaaggccaaagcucguggccagggccugggcacugaguccccacugaauuuggcacaggaaggcggcacucccagccuggcccguccugcauggggagccaccacaccgggacugcaguguuucaccuuggaggggaggaagccugggcccaacggcugaacgggacaggccaggcucacccgaggaaggggacgcaggacccacagccccuguggucaggccugugggccacguggagagaagguuccagaacagugcuuguugacgagccucucccuacaagucccuucagcagcagcuccaucccugagugucugcacaagccugcacgcauguguguaugugugccagggcgugugugcaggugugcaacaggcacauggcagcugggaggcucaggcuguggggcuggggggcuguccgcugggagaguccgggagaagcgggguguaggggcuggggggccggucaggcccagcggccaggccuggcuggcucacgguguccucaggaccuuggcuccggauuuggcagaugacagggaccagcagcaggacgcagcccagcgccaggaggacguacugggcauagugcaucaccuugggcaucaacaccagcugaguguagaaugugugaagagucucccccuccauggccccgcucucugcaaaccagagcagcggcaggaccacaggcucaaucuucccaguuuguccaaugccugcgacagauuucauguagaggcucagcugcaguuucacagagcaguucauggggauucccgugaccggguggauguccaggaacaaggagugugccuccugguuagggugcaggccagucaccgcuucugccagaaccgggucagcguugaggaagugaggaugggagagaaacaagggggcacugaaccugcaggugcugacguucugaauuccagacuccaggcacgggcagaagccuucguuggguggguagauggacccguuggcaaacaggguuuugggagccacgaagcgauagguggggaugccuucaaacaccccugacuccuuguacauuagcuucauggaucggcaggccuccgggcuguagaacuccagcgaggacucaggagucaugaagggcggccacauuugcccagaaguuccauugaucauguugcacugaucggaaugccagaagucaaccuugcucagcccguuccacuuguccacgagguggauccugcugauguucuggacccccgugaacaccgugaagagcccagagucggaguuguugagcucagcaaauaauccgaacuuguccuugaaggggaacaugccuggaaaguacuuguugaugagauucacaaggggguccuuguagccccacaugaucucacccacagugcgguucaugaaggcacguucgccgaggguggugaaugccaaggucaugaugagcuucagggucaugggcuuauucuccaucaucaccgccgcacccaagaccaggauguugggcaugacgauguagucgcucuccgagccgugggacuuggagggcuggaacuggaaggugcgguacucgaggaaggacacggugucguuguuguugaaggugauguugcuuuugugccugaacucccuguacacguagggcccgcgcucccgcaccugcggcuucucgcccuucaggaucucgcugggguucaugacgucaaagaaguagacggagagauagaaggggauagggaucuccuuccacauguugaaggacaggcuacuggggucgaugcgcacguucuggcucuugccgcggcgccgauagcuccgucucaccaggcucuuauaguucucauucuucuuagucagguaguaauagaggacgcacucagccacugucuuccucuccaggaaugaugcgaucaggccaaaguucuugggaugcugcaugaacuucucccggaaggucuccuucuccugcucacuccacauguucaugaccuggcggucuuuguacaccuucauggggucggccauaagcccguucauguugaugaacuugaugcgcugcuggucagcgucguacagcaugggcgggaucacggccagcuggcgcaucugcuucuccagguucuccugcucugagaggccaucgaugaucucugacaccucgugcucgcugcgggcggccgacauggacagcccacugccccgcuggcccacccugcucugcaugcgcuccugcagcucgcgcugcuugcggaucucagggaacugcuucucguaguacucgcgcaccuugcucuccuuggcccgccgccggggguuguucucgaugcgcuccaccuucuucucccaggccuccaugagcuggucauagcgcuggcagaacuucugcucccauuguuuccgagcgugauuccuccucuugaaguacaagauuagcuucuuccgcaucgccugguuuauuuugauguucucaugauacugccgggugucggagggcugguuguacagcggcagcuccaccuggggccccaggccuuccagaauccgaugugcagcuucagccuucuuccgguucucgucguagaugaucugcaccaggcugcggugcuucgacucgaugggcggcggugacacgggcuucucaggcucgggcggcuuggcagccuccuccuccagcuguugcugcuucuucuucagcuuagagaucugcugcucuaccauggugaucucucgguccacgcgguccauguucuggaucagcuccuccuuggacagccguggcggcaccagcuccagcucagggucagugugcggggggcuggggggagacaccgguuccagcuugcccgucaggcuacgguccuuggugaggucuucagaucccgcaggcuggcccguggccagcaggggugacggucgcagcagggggucaggcagcagcucuagccgagggcgcuugcuuucaaugaacuccaucucugacuuccccagcucgggcagguaugagugggacucuggccgcagguggagcuccugggaccguucauucccgggcuggaacucagacagcagggagggccuccgccgcuggggcuggaugauggagccgggcgacaggugggaggcauagucgcgggaguggugcugguacuccaggagcccgacguccgugugcguccgggcgaucugcacuggguaggaaaggcuguggggcggguagcggggcucaguggcccuccacgucugugccacaggcuguguggaucccgacaugguggugggggucggcggggagcugcucccaggccccaauaagcuuucucuuaaucaccaccaaggauuaaaagccaguccucgucaucagcucacgggccaccccgucacuggcaccagaaacugccuccagcgaggcuguguccucaaagacucagggagaccucgcggagguggcagcgguggcgcccgggcuuggggcgcgcucgggccgccggggcgcucaggcaaguggcggugccgaucgggcugggggcgcgcagcaggcccggccucgggucgggacgcgauccucccgccgccgccuccuagggcgccggc

SEQ ID NO: 2236 - RNA, 3962 nt, Homo sapiens
ucccauuuuuuuaaacguuuauuacuucaagagugaauuauuuuucaaagaugauaaaacucauuucuauuccaguagaaaagggucacagguuugccccaggguccaggagcgcccggaaggcagggcccccaggccucuucaccucagccugggcaccuauaaucugagggacccugugagggggugggggcagcucgggggcacagccugcggccacuucggccagagaguggccggcucaguccauaggaugaugucaguuuaggcuggaggaaaagggcgccagacaacccgaugcagugccugugaagacuucggggggaucaaaguccggccggggugggcggagacccucgggcagcugcacagggcaucuugugcucacuccauuguuuuccgaggccuguguaaaggcgcuuugccuggccuggcagguagaccaaggccaaagcucguggccagggccugggcacugaguccccacugaauuuggcacaggaaggcggcacucccagccuggcccguccugcauggggagccaccacaccgggacugcaguguuucaccuuggaggggaggaagccugggcccaacggcugaacgggacaggccaggcucacccgaggaaggggacgcaggacccacagccccuguggucaggccugugggccacguggagagaagguuccagaacagugcuuguugacgagccucucccuacaagucccuucagcagcagcuccaucccugagugucugcacaagccugcacgcauguguguaugugugccagggcgugugugcaggugugcaacaggcacauggcagcugggaggcucaggcuguggggcuggggggcuguccgcugggagaguccgggagaagcgggguguaggggcuggggggccggucaggcccagcggccaggccuggcuggcucacgguguccucaggacccuacaguuuugcuuccugcagcacagagcccuugggagcugaugucaucagggauucagaauaggccugaauggccuccuuauccuuugagcccuuuuuacuacuacuccaaaauaaauagcauuucucuuggcuccggauuuggcagaugacagggaccagcagcaggacgcagcccagcgccaggaggacguacugggcauagugcaucaccuugggcaucaacaccagcugaguguagaaugugugaagagucucccccuccauggccccgcucucugcaaaccagagcagcggcaggaccacaggcucaaucuucccaguuuguccaaugccugcgacagauuucauguagaggcucagcugcaguuucacagagcaguucauggggauucccgugaccggguggauguccaggaacaaggagugugccuccugguuagggugcaggccagucaccgcuucugccagaaccgggucagcguugaggaagugaggaugggagagaaacaagggggcacugaaccugcaggugcugacguucugaauuccagacuccaggcacgggcagaagccuucguuggguggguagauggacccguuggcaaacaggguuuugggagccacgaagcgauagguggggaugccuucaaacaccccugacuccuuguacauuagcuucauggaucggcaggccuccgggcuguagaacuccagcgaggacucaggagucaugaagggcggccacauuugcccagaaguuccauugaucauguugcacugaucggaaugccagaagucaaccuugcucagcccguuccacuuguccacgagguggauccugcugauguucuggacccccgugaacaccgugaagagcccagagucggaguuguugagcucagcaaauaauccgaacuuguccuugaaggggaacaugccuggaaaguacuuguugaugagauucacaaggggguccuuguagccccacaugaucucacccacagugcgguucaugaaggcacguucgccgaggguggugaaugccaaggucaugaugagcuucagggucaugggcuuauucuccaucaucaccgccgcacccaagaccaggauguugggcaugacgauguagucgcucuccgagccgugggacuuggagggcuggaacuggaaggugcgguacucgaggaaggacacggugucguuguuguugaaggugauguugcuuuugugccugaacucccuguacacguagggcccgcgcucccgcaccugcggcuucucgcccuucaggaucucgcugggguucaugacgucaaagaaguagacggagagauagaaggggauagggaucuccuuccacauguugaaggacaggcuacuggggucgaugcgcacguucuggcucuugccgcggcgccgauagcuccgucucaccaggcucuuauaguucucauucuucuuagucagguaguaauagaggacgcacucagccacugucuuccucuccaggaaugaugcgaucaggccaaaguucuugggaugcugcaugaacuucucccggaaggucuccuucuccugcucacuccacauguucaugaccuggcggucuuuguacaccuucauggggucggccauaagcccguucauguugaugaacuugaugcgcugcuggucagcgucguacagcaugggcgggaucacggccagcuggcgcaucugcuucuccagguucuccugcucugagaggccaucgaugaucucugacaccucgugcucgcugcgggcggccgacauggacagcccacugccccgcuggcccacccugcucugcaugcgcuccugcagcucgcgcugcuugcggaucucagggaacugcuucucguaguacucgcgcaccuugcucuccuuggcccgccgccggggguuguucucgaugcgcuccaccuucuucucccaggccuccaugagcuggucauagcgcuggcagaacuucugcucccauuguuuccgagcgugauuccuccucuugaaguacaagauuagcuucuuccgcaucgccugguuuauuuugauguucucaugauacugccgggugucggagggcugguuguacagcggcagcuccaccuggggccccaggccuuccagaauccgaugugcagcuucagccuucuuccgguucucgucguagaugaucugcaccaggcugcggugcuucgacucgaugggcggcggugacacgggcuucucaggcucgggcggcuuggcagccuccuccuccagcuguugcugcuucuucuucagcuuagagaucugcugcucuaccauggugaucucucgguccacgcgguccauguucuggaucagcuccuccuuggacagccguggcggcaccagcuccagcucagggucagugugcggggggcuggggggagacaccgguuccagcuugcccgucaggcuacgguccuuggugaggucuucagaucccgcaggcuggcccguggccagcaggggugacggucgcagcagggggucaggcagcagcucuagccgagggcgcuugcuuucaaugaacuccaucucugacuuccccagcucgggcagguaugagugggacucuggccgcagguggagcuccugggaccguucauucccgggcuggaacucagacagcagggagggccuccgccgcuggggcuggaugauggagccgggcgacaggugggaggcauagucgcgggaguggugcugguacuccaggagcccgacguccgugugcguccgggcgaucugcacuggguaggaaaggcuguggggcggguagcggggcucaguggcccuccacgucugugccacaggcuguguggaucccgacaugguggugggggucggcggggagcugcucccaggccccaauaagcuuucucuuaaucaccaccaaggauuaaaagccaguccucgucaucagcucacgggccaccccgucacuggcac

SEQ ID NO: 2237 - RNA, 1691 nt, Homo sapiens
ucccauuuuuuuaaacguuuauuacuucaagagugaauuauuuuucaaagaugauaaaacucauuucuauuccaguagaaaagggucacagguuugccccaggguccaggagcgcccggaaggcagggcccccaggccucuucaccucagccugggcaccuauaaucugagggacccugugagggggugggggcagcucgggggcacagccugcggccacuucggccagagaguggccggcucaguccauaggaugaugucaguuuaggcuggaggaaaagggcgccagacaacccgaugcagugccugugaagacuucggggggaucaaaguccggccggggugggcggagacccucgggcagcugcacagggcaucuugugcucacuccauuguuuuccgaggccuguguaaaggcgcuuugccuggccuggcagguagaccaaggccaaagcucguggccagggccugggcacugaguccccacugaauuuggcacaggaaggcggcacucccagccuggcccguccugcauggggagccaccacaccgggacugcaguguuucaccuuggaggggaggaagccugggcccaacggcugaacgggacaggccaggcucacccgaggaaggggacgcaggacccacagccccuguggucaggccugugggccacguggagagaagguuccagaacagugcuuguugacgagccucucccuacaagucccuucagcagcagcuccaucccugagugucugcacaagccugcacgcauguguguaugugugccagggcgugugugcaggugugcaacaggcacauggcagcugggaggcucaggcuguggggcuggggggcuguccgcugggagaguccgggagaagcgggguguaggggcuggggggccggucaggcccagcggccaggccuggcuggcucacgguguccucaggacccuuggugaggucuucagaucccgcaggcuggcccguggccagcaggggugacggucgcagcagggggucaggcagcagcucuagccgagggcgcuugcuuucaaugaacuccaucucugacuuccccagcucgggcagguaugagugggacucuggccgcagguggagcuccugggaccguucauucccgggcuggaacucagacagcagggagggccuccgccgcuggggcuggaugauggagccgggcgacaggugggaggcauagucgcgggaguggugcugguacuccaggagcccgacguccgugugcguccgggcgaucugcacuggguaggaaaggcuguggggcggguagcggggcucaguggcccuccacgucugugccacaggcuguguggaucccgacaugguggugggggucggcggggagcugcucccaggccccaauaagcuuucucuuaaucaccaccaaggauuaaaagccaguccucgucaucagcucacgggccaccccgucacuggcaccagaaacugccuccagcgaggcuguguccucaaagacucagggagaccucgcggagguggcagcgguggcgcccgggcuuggggcgcgcucgggccgccggggcgcucaggcaaguggcggugccgaucgggcugggggcgcgcagcaggcccggccucgggucgggacgcgauccucccgccgccgccuccuagggcgccggc

SEQ ID NO: 2238 - RNA, 3153 nt, Homo sapiens
ucccauuuuuuuaaacguuuauuacuucaagagugaauuauuuuucaaagaugauaaaacucauuucuauuccaguagaaaagggucacagguuugccccaggguccaggagcgcccggaaggcagggcccccaggccucuucaccucagccugggcaccuauaaucugagggacccugugagggggugggggcagcucgggggcacagccugcggccacuucggccagagaguggccggcucaguccauaggaugaugucaguuuaggcuggaggaaaagggcgccagacaacccgaugcagugccugugaagacuucggggggaucaaaguccggccggggugggcggagacccucgggcagcugcacagggcaucuugugcucacuccauuguuuuccgaggccuguguaaaggcgcuuugccuggccuggcagguagaccaaggccaaagcucguggccagggccugggcacugaguccccacugaauuuggcacaggaaggcggcacucccagccuggcccguccugcauggggagccaccacaccgggacugcaguguuucaccuuggaggggaggaagccugggcccaacggcugaacgggacaggccaggcucacccgaggaaggggacgcaggacccacagccccuguggucaggccugugggccacguggagagaagguuccagaacagugcuuguugacgagccucucccuacaagucccuucagcagcagcuccaucccugagugucugcacaagccugcacgcauguguguaugugugccagggcgugugugcaggugugcaacaggcacauggcagcugggaggcucaggcuguggggcuggggggcuguccgcugggagaguccgggagaagcgggguguaggggcuggggggccggucaggcccagcggccaggccuggcuggcucacgguguccucaggacccuuucuuggcuguuuccauuucuucuucuguccagcgagaacucucauucagcuccauggaggccagcucggcgcucugcuggggggugauggccuccucgcuguuggccucauuagccauugagcgggugaugcggccuuugcgucuucccuggcuguuggcaguuuugcggccuuuggaggccacagccuccuucucgucguuguccuccccugaggugucgucugucuucuccuugaggaggucuuccuugucguucuccaccuccggcuucuccuccuccuucuccgccuccuuuuccuucuccuucucaucuuucuccuccuggcugcugcggggcaugggcugcugcugcugcugcugcugcugcugcugcugcuguuguugcugcugcuggcucuugccgcggcgccgauagcuccgucucaccaggcucuuauaguucucauucuucuuagucagguaguaauagaggacgcacucagccacugucuuccucuccaggaaugaugcgaucaggccaaaguucuugggaugcugcaugaacuucucccggaaggucuccuucuccugcucacuccacauguucaugaccuggcggucuuuguacaccuucauggggucggccauaagcccguucauguugaugaacuugaugcgcugcuggucagcgucguacagcaugggcgggaucacggccagcuggcgcaucugcuucuccagguucuccugcucugagaggccaucgaugaucucugacaccucgugcucgcugcgggcggccgacauggacagcccacugccccgcuggcccacccucugcaugcgcuccugcagcucgcgcugcuugcggaucucagggaacugcuucucguaguacucgcgcaccuugcucuccuuggcccgccgccggggguuguucucgaugcgcuccaccuucuucucccaggccuccaugagcuggucauagcgcuggcagaacuucugcucccauuguuuccgagcgugauuccuccucuugaaguacaagauuagcuucuuccgcaucgccugguuuauuuugauguucucaugauacugccgggugucggagggcugguuguacagcggcagcuccaccuggggccccaggccuuccagaauccgaugugcagcuucagccuucuuccgguucucgucguagaugaucugcaccaggcugcggugcuucgacucgaugggcggcggugacacgggcuucucaggcucgggcggcuuggcagccuccuccuccagcuguugcugcuucuucuucagcuuagagaucugcugcucuaccauggugaucucucgguccacgcgguccauguucuggaucagcuccuccuuggacagccguggcggcaccagcuccagcucagggucagugugcggggggcuggggggagacaccgguuccagcuugcccgucaggcuacgguccuuggugaggucuucagaucccgcaggcuggcccguggccagcaggggugacggucgcagcagggggucaggcagcagcucuagccgagggcgcuugcuuucaaugaacuccaucucugacuuccccagcucgggcagguaugagugggacucuggccgcagguggagcuccugggaccguucauucccgggcuggaacucagacagcagggagggccuccgccgcuggggcuggaugauggagccgggcgacaggugggaggcauagucgcgggaguggugcugguacuccaggagcccgacguccgugugcguccgggcgaucugcacuggguaggaaaggcuguggggcggguagcggggcucaguggcccuccacgucugugccacaggcuguguggaucccgacaugguggugggggucggcggggagcugcucccaggccccaauaagcuuucucuuaaucaccaccaaggauuaaaagccaguccucgucaucagcucacgggccaccccgucacuggcaccagaaacugccuccagcgaggcuguguccucaaagacucagggagaccucgcggagguggcagcgguggcgcccgggcuuggggcgcgcucgggccgccggggcgcucaggcaaguggcggugccgaucgggcugggggcgcgcagcaggcccggccucgggucgggacgcgauccucccgccgccgccuccuagggcgccggc

SEQ ID NO: 2239 - RNA, 3878 nt, Homo sapiens
ucccauuuuuuuaaacguuuauuacuucaagagugaauuauuuuucaaagaugauaaaacucauuucuauuccaguagaaaagggucacagguuugccccaggguccaggagcgcccggaaggcagggcccccaggccucuucaccucagccugggcaccuauaaucugagggacccugugagggggugggggcagcucgggggcacagccugcggccacuucggccagagaguggccggcucaguccauaggaugaugucaguuuaggcuggaggaaaagggcgccagacaacccgaugcagugccugugaagacuucggggggaucaaaguccggccggggugggcggagacccucgggcagcugcacagggcaucuugugcucacuccauuguuuuccgaggccuguguaaaggcgcuuugccuggccuggcagguagaccaaggccaaagcucguggccagggccugggcacugaguccccacugaauuuggcacaggaaggcggcacucccagccuggcccguccugcauggggagccaccacaccgggacugcaguguuucaccuuggaggggaggaagccugggcccaacggcugaacgggacaggccaggcucacccgaggaaggggacgcaggacccacagccccuguggucaggccugugggccacguggagagaagguuccagaacagugcuuguugacgagccucucccuacaagucccuucagcagcagcuccaucccugagugucugcacaagccugcacgcauguguguaugugugccagggcgugugugcaggugugcaacaggcacauggcagcugggaggcucaggcuguggggcuggggggcuguccgcugggagaguccgggagaagcgggguguaggggcuggggggccggucaggcccagcggccaggccuggcuggcucacgguguccucaggacccuacaguuuugcuuccugcagcacagagcccuugggagcugaugucaucagggauucagaauaggccugaauggccuccuuauccuuugagcccuuuuuacuacuacuccaaaauaaauagcauuucuccuugggcaucaacaccagcugaguguagaaugugugaagagucucccccuccauggccccgcucucugcaaaccagagcagcggcaggaccacaggcucaaucuucccaguuuguccaaugccugcgacagauuucauguagaggcucagcugcaguuucacagagcaguucauggggauucccgugaccggguggauguccaggaacaaggagugugccuccugguuagggugcaggccagucaccgcuucugccagaaccgggucagcguugaggaagugaggaugggagagaaacaagggggcacugaaccugcaggugcugacguucugaauuccagacuccaggcacgggcagaagccuucguuggguggguagauggacccguuggcaaacaggguuuugggagccacgaagcgauagguggggaugccuucaaacaccccugacuccuuguacauuagcuucauggaucggcaggccuccgggcuguagaacuccagcgaggacucaggagucaugaagggcggccacauuugcccagaaguuccauugaucauguugcacugaucggaaugccagaagucaaccuugcucagcccguuccacuuguccacgagguggauccugcugauguucuggacccccgugaacaccgugaagagcccagagucggaguuguugagcucagcaaauaauccgaacuuguccuugaaggggaacaugccuggaaaguacuuguugaugagauucacaaggggguccuuguagccccacaugaucucacccacagugcgguucaugaaggcacguucgccgaggguggugaaugccaaggucaugaugagcuucagggucaugggcuuauucuccaucaucaccgccgcacccaagaccaggauguugggcaugacgauguagucgcucuccgagccgugggacuuggagggcuggaacuggaaggugcgguacucgaggaaggacacggugucguuguuguugaaggugauguugcuuuugugccugaacucccuguacacguagggcccgcgcucccgcaccugcggcuucucgcccuucaggaucucgcugggguucaugacgucaaagaaguagacggagagauagaaggggauagggaucuccuuccacauguugaaggacaggcuacuggggucgaugcgcacguucuggcucuugccgcggcgccgauagcuccgucucaccaggcucuuauaguucucauucuucuuagucagguaguaauagaggacgcacucagccacugucuuccucuccaggaaugaugcgaucaggccaaaguucuugggaugcugcaugaacuucucccggaaggucuccuucuccugcucacuccacauguucaugaccuggcggucuuuguacaccuucauggggucggccauaagcccguucauguugaugaacuugaugcgcugcuggucagcgucguacagcaugggcgggaucacggccagcuggcgcaucugcuucuccagguucuccugcucugagaggccaucgaugaucucugacaccucgugcucgcugcgggcggccgacauggacagcccacugccccgcuggcccacccugcucugcaugcgcuccugcagcucgcgcugcuugcggaucucagggaacugcuucucguaguacucgcgcaccuugcucuccuuggcccgccgccggggguuguucucgaugcgcuccaccuucuucucccaggccuccaugagcuggucauagcgcuggcagaacuucugcucccauuguuuccgagcgugauuccuccucuugaaguacaagauuagcuucuuccgcaucgccugguuuauuuugauguucucaugauacugccgggugucggagggcugguuguacagcggcagcuccaccuggggccccaggccuuccagaauccgaugugcagcuucagccuucuuccgguucucgucguagaugaucugcaccaggcugcggugcuucgacucgaugggcggcggugacacgggcuucucaggcucgggcggcuuggcagccuccuccuccagcuguugcugcuucuucuucagcuuagagaucugcugcucuaccauggugaucucucgguccacgcgguccauguucuggaucagcuccuccuuggacagccguggcggcaccagcuccagcucagggucagugugcggggggcuggggggagacaccgguuccagcuugcccgucaggcuacgguccuuggugaggucuucagaucccgcaggcuggcccguggccagcaggggugacggucgcagcagggggucaggcagcagcucuagccgagggcgcuugcuuucaaugaacuccaucucugacuuccccagcucgggcagguaugagugggacucuggccgcagguggagcuccugggaccguucauucccgggcuggaacucagacagcagggagggccuccgccgcuggggcuggaugauggagccgggcgacaggugggaggcauagucgcgggaguggugcugguacuccaggagcccgacguccgugugcguccgggcgaucugcacuggguaggaaaggcuguggggcggguagcggggcucaguggcccuccacgucugugccacaggcuguguggaucccgacaugguggugggggucggcggggagcugcucccaggccccaauaagcuuucucuuaaucaccaccaaggauuaaaagccaguccucgucaucagcucacgggccaccccgucacuggcac

SEQ ID NO: 2240 - RNA, 3257 nt, Homo sapiens
ucccauuuuuuuaaacguuuauuacuucaagagugaauuauuuuucaaagaugauaaaacucauuucuauuccaguagaaaagggucacagguuugccccaggguccaggagcgcccggaaggcagggcccccaggccucuucaccucagccugggcaccuauaaucugagggacccugugagggggugggggcagcucgggggcacagccugcggccacuucggccagagaguggccggcucaguccauaggaugaugucaguuuaggcuggaggaaaagggcgccagacaacccgaugcagugccugugaagacuucggggggaucaaaguccggccggggugggcggagacccucgggcagcugcacagggcaucuugugcucacuccauuguuuuccgaggccuguguaaaggcgcuuugccuggccuggcagguagaccaaggccaaagcucguggccagggccugggcacugaguccccacugaauuuggcacaggaaggcggcacucccagccuggcccguccugcauggggagccaccacaccgggacugcaguguuucaccuuggaggggaggaagccugggcccaacggcugaacgggacaggccaggcucacccgaggaaggggacgcaggacccacagccccuguggucaggccugugggccacguggagagaagguuccagaacagugcuuguugacgagccucucccuacaagucccuucagcagcagcuccaucccugagugucugcacaagccugcacgcauguguguaugugugccagggcgugugugcaggugugcaacaggcacauggcagcugggaggcucaggcuguggggcuggggggcuguccgcugggagaguccgggagaagcgggguguaggggcuggggggccggucaggcccagcggccaggccuggcuggcucacgguguccucaggacccuacaguuuugcuuccugcagcacagagcccuugggagcugaugucaucagggauucagaauaggccugaauggccuccuuauccuuugagcccuuuuuacuacuacuccaaaauaaauagcauuucuccuugggcaucaacaccagcugaguguagaaugugugaagagucucccccuccauggccccgcucucugcaaaccagagcagcggcaggaccacaggcucaaucuucccaguuuguccaaugccugcgacagauuucauguagaggcucagcugcaguuucacagagcaguucauggggauucccgugaccggguggauguccaggaacaaggagugugccuccugguuagggugcaggccagucaccgcuucugccagaaccgggucagcguugaggaagugaggaugggagagaaacaagggggcacugaaccugcaggugcugacguucugaauuccagacuccaggcacgggcagaagccuucguuggguggguagauggacccguuggcaaacaggguuuugggagccacgaagcgauagguggggaugccuucaaacaccccugacuccuuguacauuagcuucauggaucggcaggccuccgggcuguagaacuccagcgaggacucaggagucaugaagggcggccacauuugcccagaaguuccauugaucauguugcacugaucggaaugccagaagucaaccuugcucagcccguuccacuuguccacgagguggauccugcugauguucuggacccccgugaacaccgugaagagcccagagucggaguuguugagcucagcaaauaauccgaacuuguccuugaaggggaacaugccuggaaaguacuuguugaugagauucacaaggggguccuuguagccccacaugaucucacccacagugcgguucaugaaggcacguucgccgaggguggugaaugccaaggucaugaugagcuucagggucaugggcuuauucuccaucaucaccgccgcacccaagaccaggauguugggcaugacgauguagucgcucuccgagccgugggacuuggagggcuggaacuggaaggugcgguacucgaggaaggacacggugucguuguuguugaaggugauguugcuuuugugccugaacuccauuuugauguucucaugauacugccgggugucggagggcugguuguacagcggcagcuccaccuggggccccaggccuuccagaauccgaugugcagcuucagccuucuuccgguucucgucguagaugaucugcaccaggcugcggugcuucgacucgaugggcggcggugacacgggcuucucaggcucgggcggcuuggcagccuccuccuccagcuguugcugcuucuucuucagcuuagagaucugcugcucuaccauggugaucucucgguccacgcgguccauguucuggaucagcuccuccuuggacagccguggcggcaccagcuccagcucagggucagugugcggggggcuggggggagacaccgguuccagcuugcccgucaggcuacgguccuuggugaggucuucagaucccgcaggcuggcccguggccagcaggggugacggucgcagcagggggucaggcagcagcucuagccgagggcgcuugcuuucaaugaacuccaucucugacuuccccagcucgggcagguaugagugggacucuggccgcagguggagcuccugggaccguucauucccgggcuggaacucagacagcagggagggccuccgccgcuggggcuggaugauggagccgggcgacaggugggaggcauagucgcgggaguggugcugguacuccaggagcccgacguccgugugcguccgggcgaucugcacuggguaggaaaggcuguggggcggguagcggggcucaguggcccuccacgucugugccacaggcuguguggaucccgacaugguggugggggucggcggggagcugcucccaggccccaauaagcuuucucuuaaucaccaccaaggauuaaaagccaguccucgucaucagcucacgggccaccccgucacuggcaccagaaacugccuccagcgaggcuguguccucaaagacucagggagaccucgcggagguggcagcgguggcgcccgggcuuggggcgcgcucgggccgccggggcgcucaggcaaguggcggugccgaucgggcugggggcgcgcagcaggcccggccucgggucgggacgcgauccucccgccgccgccuccuagggcgccggc

SEQ ID NO: 2241 - skipped

SEQ ID NO: 2242 - RNA, 3305 nt, Homo sapiens
ucccauuuuuuuaaacguuuauuacuucaagagugaauuauuuuucaaagaugauaaaacucauuucuauuccaguagaaaagggucacagguuugccccaggguccaggagcgcccggaaggcagggcccccaggccucuucaccucagccugggcaccuauaaucugagggacccugugagggggugggggcagcucgggggcacagccugcggccacuucggccagagaguggccggcucaguccauaggaugaugucaguuuaggcuggaggaaaagggcgccagacaacccgaugcagugccugugaagacuucggggggaucaaaguccggccggggugggcggagacccucgggcagcugcacagggcaucuugugcucacuccauuguuuuccgaggccuguguaaaggcgcuuugccuggccuggcagguagaccaaggccaaagcucguggccagggccugggcacugaguccccacugaauuuggcacaggaaggcggcacucccagccuggcccguccugcauggggagccaccacaccgggacugcaguguuucaccuuggaggggaggaagccugggcccaacggcugaacgggacaggccaggcucacccgaggaaggggacgcaggacccacagccccuguggucaggccugugggccacguggagagaagguuccagaacagugcuuguugacgagccucucccuacaagucccuucagcagcagcuccaucccugagugucugcacaagccugcacgcauguguguaugugugccagggcgugugugcaggugugcaacaggcacauggcagcugggaggcucaggcuguggggcuggggggcuguccgcugggagaguccgggagaagcgggguguaggggcuggggggccggucaggcccagcggccaggccuggcuggcucacgguguccucaggacccuacaguuuugcuuccugcagcacagagcccuugggagcugaugucaucagggauucagaauaggccugaauggccuccuuauccuuugagcccuuuuuacuacuacuccaaaauaaauagcauuucuccuugggcaucaacaccagcugaguguagaaugugugaagagucucccccuccauggccccgcucucugcaaaccagagcagcggcaggaccacaggcucaaucuucccaguuuguccaaugccugcgacagauuucauguagaggcucagcugcaguuucacagagcaguucauggggauucccgugaccggguggauguccaggaacaaggagugugccuccugguuagggugcaggccagucaccgcuucugccagaaccgggucagcguugaggaagugaggaugggagagaaacaagggggcacugaaccugcaggugcugacguucugaauuccagacuccaggcacgggcagaagccuucguuggguggguagauggacccguuggcaaacaggguuuugggagccacgaagcgauagguggggaugccuucaaacaccccugacuccuuguacauuagcuucauggaucggcaggccuccgggcuguagaacuccagcgaggacucaggagucaugaagggcggccacauuugcccagaaguuccauugaucauguugcacugaucggaaugccagaagucaaccuugcucagcccguuccacuuguccacgagguggauccugcugauguucuggacccccgugaacaccgugaagagcccagagucggaguuguugagcucagcaaauaauccgaacuuguccuugaaggggaacaugccuggaaaguacuuguugaugagauucacaaggggguccuuguagccccacaugaucucacccacagugcgguucaugaaggcacguucgccgaggguggugaaugccaaggucaugaugagcuucagggucaugggcuuauucuccaucaucaccgccgcacccaagaccaggauguugggcaugacgauguagucgcucuccgagccgugggacuuggagggcuggaacuggaaggugcgguacucgaggaaggacacggugucguuguuguugaaggugauguugcuuuugugccugaacucccuguacacguagggcccgcgcucccgcaccugcggcuucucgcccuucaggaucucgcugggguucaugacgucaaagaaguagacggagagauagaaggggauagggaucuccuuccacauguugaaggacaggcuacuggggucgaugcgcacguuccgguucucgucguagaugaucugcaccaggcugcggugcuucgacucgaugggcggcggugacacgggcuucucaggcucgggcggcuuggcagccuccuccuccagcuguugcugcuucuucuucagcuuagagaucugcugcucuaccauggugaucucucgguccacgcgguccauguucuggaucagcuccuccuuggacagccguggcggcaccagcuccagcucagggucagugugcggggggcuggggggagacaccgguuccagcuugcccgucaggcuacgguccuuggugaggucuucagaucccgcaggcuggcccguggccagcaggggugacggucgcagcagggggucaggcagcagcucuagccgagggcgcuugcuuucaaugaacuccaucucugacuuccccagcucgggcagguaugagugggacucuggccgcagguggagcuccugggaccguucauucccgggcuggaacucagacagcagggagggccuccgccgcuggggcuggaugauggagccgggcgacaggugggaggcauagucgcgggaguggugcugguacuccaggagcccgacguccgugugcguccgggcgaucugcacuggguaggaaaggcuguggggcggguagcggggcucaguggcccuccacgucugugccacaggcuguguggaucccgacaugguggugggggucggcggggagcugcucccaggccccaauaagcuuucucuuaaucaccaccaaggauuaaaagccaguccucgucaucagcucacgggccaccccgucacuggcaccagaaacugccuccagcgaggcuguguccucaaagacucagggagaccucgcggagguggcagcgguggcgcccgggcuuggggcgcgcucgggccgccggggcgcucaggcaaguggcggugccgaucgggcugggggcgcgcagcaggcccggccucgggucgggacgcgauccucccgccgccgccuccuagggcgccggc

SEQ ID NO: 2243 - RNA, 3212 nt, Homo sapiens
ucccauuuuuuuaaacguuuauuacuucaagagugaauuauuuuucaaagaugauaaaacucauuucuauuccaguagaaaagggucacagguuugccccaggguccaggagcgcccggaaggcagggcccccaggccucuucaccucagccugggcaccuauaaucugagggacccugugagggggugggggcagcucgggggcacagccugcggccacuucggccagagaguggccggcucaguccauaggaugaugucaguuuaggcuggaggaaaagggcgccagacaacccgaugcagugccugugaagacuucggggggaucaaaguccggccggggugggcggagacccucgggcagcugcacagggcaucuugugcucacuccauuguuuuccgaggccuguguaaaggcgcuuugccuggccuggcagguagaccaaggccaaagcucguggccagggccugggcacugaguccccacugaauuuggcacaggaaggcggcacucccagccuggcccguccugcauggggagccaccacaccgggacugcaguguuucaccuuggaggggaggaagccugggcccaacggcugaacgggacaggccaggcucacccgaggaaggggacgcaggacccacagccccuguggucaggccugugggccacguggagagaagguuccagaacagugcuuguugacgagccucucccuacaagucccuucagcagcagcuccaucccugagugucugcacaagccugcacgcauguguguaugugugccagggcgugugugcaggugugcaacaggcacauggcagcugggaggcucaggcuguggggcuggggggcuguccgcugggagaguccgggagaagcgggguguaggggcuggggggccggucaggcccagcggccaggccuggcuggcucacgguguccucaggaccuuggcuccggauuuggcagaugacagggaccagcagcaggacgcagcccagcgccaggaggacguacugggcauagugcaucaccuugggcaucaacaccagcugaguguagaaugugugaagagucucccccuccauggccccgcucucugcaaaccagagcagcggcaggaccacaggcucaaucuucccaguuuguccaaugccugcgacagauuucauguagaggcucagcugcaguuucacagagcaguucauggggauucccgugaccggguggauguccaggaacaaggagugugccuccugguuagggugcaggccagucaccgcuucugccagaaccgggucagcguugaggaagugaggaugggagagaaacaagggggcacugaaccugcaggugcugacguucugaauuccagacuccaggcacgggcagaagccuucguuggguggguagauggacccguuggcaaacaggguuuugggagccacgaagcgauagguggggaugccuucaaacaccccugacuccuuguacauuagcuucauggaucggcaggccuccgggcuguagaacuccagcgaggacucaggagucaugaagggcggccacauuugcccagaaguuccauugaucauguugcacugaucggaaugccagaagucaaccuugcucagcccguuccacuuguccacgagguggauccugcugauguucuggacccccgugaacaccgugaagagcccagagucggaguuguugagcucagcaaauaauccgaacuuguccuugaaggggaacaugccuggaaaguacuuguugaugagauucacaaggggguccuuguagccccacaugaucucacccacagugcgguucaugaaggcacguucgccgaggguggugaaugccaaggucaugaugagcuucagggucaugggcuuauucuccaucaucaccgccgcacccaagaccaggauguugggcaugacgauguagucgcucuccgagccgugggacuuggagggcuggaacuggaaggugcgguacucgaggaaggacacggugucguuguuguugaaggugauguugcuuuugugccugaacuccauuuugauguucucaugauacugccgggugucggagggcugguuguacagcggcagcuccaccuggggccccaggccuuccagaauccgaugugcagcuucagccuucuuccgguucucgucguagaugaucugcaccaggcugcggugcuucgacucgaugggcggcggugacacgggcuucucaggcucgggcggcuuggcagccuccuccuccagcuguugcugcuucuucuucagcuuagagaucugcugcucuaccauggugaucucucgguccacgcgguccauguucuggaucagcuccuccuuggacagccguggcggcaccagcuccagcucagggucagugugcggggggcuggggggagacaccgguuccagcuugcccgucaggcuacgguccuuggugaggucuucagaucccgcaggcuggcccguggccagcaggggugacggucgcagcagggggucaggcagcagcucuagccgagggcgcuugcuuucaaugaacuccaucucugacuuccccagcucgggcagguaugagugggacucuggccgcagguggagcuccugggaccguucauucccgggcuggaacucagacagcagggagggccuccgccgcuggggcuggaugauggagccgggcgacaggugggaggcauagucgcgggaguggugcugguacuccaggagcccgacguccgugugcguccgggcgaucugcacuggguaggaaaggcuguggggcggguagcggggcucaguggcccuccacgucugugccacaggcuguguggaucccgacaugguggugggggucggcggggagcugcucccaggccccaauaagcuuucucuuaaucaccaccaaggauuaaaagccaguccucgucaucagcucacgggccaccccgucacuggcaccagaaacugccuccagcgaggcuguguccucaaagacucagggagaccucgcggagguggcagcgguggcgcccgggcuuggggcgcgcucgggccgccggggcgcucaggcaaguggcggugccgaucgggcugggggcgcgcagcaggcccggccucgggucgggacgcgauccucccgccgccgccuccuagggcgccggc

SEQ ID NO: 2244-2245 - skipped (2 entries)

SEQ ID NO: 2246 - RNA, 1230 nt, Homo sapiens
gauggcauccucaaccaaauguuuugaauuuauuauaaucgugcuucucuacaacuaaugauucuugugguuugcaaaccaugucugccuuuauuuaccuacacaaacacggaacagaauuuccaauaggagagguucacacagcuaacaaagcauagagugugugaccucaauaaggcauucaacaaagacacacgccguauuucccucugacugcguucccuuaggaugcucugauguuggcgucgcauucuucuaaaaguagaaucaaaucuucaaucaggcuguguucucugccaugugucacucucauaauaucaaaagccuugcccgggaagggccccgggaggagcaaccucagggccugccucuugagcuccaccaggcgggcguugcaguucucgcaccagacgccgcgguccgagccgggggaggagccgccgccgcugccggagcccggggagccugugccgaagcccggagagccgcccaaggagcccggcgaacuagugccgaugccgggggaggcgggucccggggagccggugaacgagcucggggacgaggugcccgagccgggagacgggguccccgaggagccgagcgcugagcccgcgcccucaggagugggccggcugccggcgcgcgacuccucguaugcuuuccgguaccagcuuuccggggagaagggcgcugcgggcuuggugggcgagcagacuucauucaccccguauuucuugccccugguggagaccgcaagccucucuuuauucccagcuaccgaauucaugguggcuuuuccagaggagaguaucuaaagguuccaccgacgcuacauccagaagguccuccaacccagaagcgucccccggcugcagggggcuggcucucagcccucagggcaagguuucuucagcgguggggugggagggaaugaaagcaaauggaucccacaaguaauagcaccaauuugcagaaaggguuggggucgcugguuuauucuucucuucaaagcaugcuuuuccucguccccuucugccucuuccagccgcacguccucuugucacggccacauccacagaacuggcauuuucuucagccaagucaguccgugcucccccacgaggaaagcgagggauacaaucagggcucgcggccgcugccgggaaggugggagagccgagccgagucagcugugggaacuugucuccuucaccgagcuugguaacu

SEQ ID NO: 2247 - RNA, 1713 nt, Homo sapiens
gauggcauccucaaccaaauguuuugaauuuauuauaaucgugcuucucuacaacuaaugauucuugugguuugcaaaccaugucugccuuuauuuaccuacacaaacacggaacagaauuuccaauaggagagguucacacagcuaacaaagcauagagugugugaccucaauaaggcauucaacaaagacacacgccguauuucccucugacugcguucccuuaggaugcucugauguuggcgucgcauucuucuaaaaguagaaucaaaucuucaaucaggcuguguucucugccaugugucacucucauaauaucaaaagccagucucagauucuucauugcuuggggaaacaugccuugauguagcugcaguuugccaacuuucaucacuugaaccccucugacgggauggcuuccugggaaaaaaauccuguauggcuccaugguccgaguaccauagaacaaggcuuccuccaacaggccgagguugaugcaggcauccauggcgcagucgagcaccuucagcugguagauguugauaucgggaagccguucagaauugcugcuuaugauugccuggcacauggccagaaccugcucccacuuccagugugccuucaguucuucaauuuuuuucagggauucuugaacuuccuuccauacuugcucaucaccaguuagcauaucagcauccuuguccuggguuuggcaacggaaacagucacauucaaagcaguacuggucccucagcugcuuccggcgcuccucacuggucaucagcauauccagguagcagauggugagcuugcccgggaagggccccgggaggagcaaccucagggccugccucuugagcuccaccaggcgggcguugcaguucucgcaccagacgccgcgguccgagccgggggaggagccgccgccgcugccggagcccggggagccugugccgaagcccggagagccgcccaaggagcccggcgaacuagugccgaugccgggggaggcgggucccggggagccggugaacgagcucggggacgaggugcccgagccgggagacgggguccccgaggagccgagcgcugagcccgcgcccucaggagugggccggcugccggcgcgcgacuccucguaugcuuuccgguaccagcuuuccggggagaagggcgcugcgggcuuggugggcgagcagacuucauucaccccguauuucuugccccugguggagaccgcaagccucucuuuauucccagcuaccgaauucaugguggcuuuuccagaggagaguaucuaaagguuccaccgacgcuacauccagaagguccuccaacccagaagcgucccccggcugcagggggcuggcucucagcccucagggcaagguuucuucagcgguggggugggagggaaugaaagcaaauggaucccacaaguaauagcaccaauuugcagaaaggguuggggucgcugguuuauucuucucuucaaagcaugcuuuuccucguccccuucugccucuuccagccgcacguccucuugucacggccacauccacagaacuggcauuuucuucagccaagucaguccgugcucccccacgaggaaagcgagggauacaaucagggcucgcggccgcugccgggaaggugggagagccgagccgagucagcugugggaacuugucuccuucaccgagcuugguaacu

SEQ ID NO: 2248 - RNA, 1602 nt, Homo sapiens
gauggcauccucaaccaaauguuuugaauuuauuauaaucgugcuucucuacaacuaaugauucuugugguuugcaaaccaugucugccuuuauuuaccuacacaaacacggaacagaauuuccaauaggagagguucacacagcuaacaaagcauagagugugugaccucaauaaggcauucaacaaagacacacgccguauuucccucugacugcguucccuuaggaugcucugauguuggcgucgcauucuucuaaaaguagaaucaaaucuucaaucaggcuguguucucugccaugugucacucucauaauaucaaaagccagucucagauucuucauugcuuggggaaacaugccuugauguagcugcaguuugccaacuuucaucacuugaaccccucugacgggauggcuuccugggaaaaaaauccuguauggcuccaugguccgaguaccauagaacaaggcuuccuccaacaggccgagguugaugcaggcauccauggcgcagucgagcaccuucagcugguagauguugauaucgggaagccguucagaauugcugcuuaugauugccuggcacauggccagaaccugcucccacuuccagugugccuucaguucuucaauuuuuuucagggauucuugaacuuccuuccauacuugcucaucaccaguuagcauaucagcauccuugcccgggaagggccccgggaggagcaaccucagggccugccucuugagcuccaccaggcgggcguugcaguucucgcaccagacgccgcgguccgagccgggggaggagccgccgccgcugccggagcccggggagccugugccgaagcccggagagccgcccaaggagcccggcgaacuagugccgaugccgggggaggcgggucccggggagccggugaacgagcucggggacgaggugcccgagccgggagacgggguccccgaggagccgagcgcugagcccgcgcccucaggagugggccggcugccggcgcgcgacuccucguaugcuuuccgguaccagcuuuccggggagaagggcgcugcgggcuuggugggcgagcagacuucauucaccccguauuucuugccccugguggagaccgcaagccucucuuuauucccagcuaccgaauucaugguggcuuuuccagaggagaguaucuaaagguuccaccgacgcuacauccagaagguccuccaacccagaagcgucccccggcugcagggggcuggcucucagcccucagggcaagguuucuucagcgguggggugggagggaaugaaagcaaauggaucccacaaguaauagcaccaauuugcagaaaggguuggggucgcugguuuauucuucucuucaaagcaugcuuuuccucguccccuucugccucuuccagccgcacguccucuugucacggccacauccacagaacuggcauuuucuucagccaagucaguccgugcucccccacgaggaaagcgagggauacaaucagggcucgcggccgcugccgggaaggugggagagccgagccgagucagcugugggaacuugucuccuucaccgagcuugguaacu

SEQ ID NO: 2249 - RNA, 2769 nt, Homo sapiens
gauggcauccucaaccaaauguuuugaauuuauuauaaucgugcuucucuacaacuaaugauucuugugguuugcaaaccaugucugccuuuauuuaccuacacaaacacggaacagaauuuccaauaggagagguucacacagcuaacaaagcauagagugugugaccucaauaaggcauucaacaaagacacacgccguauuucccucugacugcguucccuuaggaugcucugauguuggcgucgcauucuucuaaaaguagaaucaaaucuucaaucaggcuguguucucugccaugugucacucucauaauaucaaaagccagucucagauucuucauugcuuggggaaacaugccuugauguagcugcaguuugccaacuuucaucacuugaaccccucugacgggauggcuuccugggaaaaaaauccuguauggcuccaugguccgaguaccauagaacaaggcuuccuccaacaggccgagguugaugcaggcauccauggcgcagucgagcaccuucagcugguagauguugauaucgggaagccguucagaauugcugcuuaugauugccuggcacauggccagaaccugcucccacuuccagugugccuucaguucuucaauuuuuuucagggauucuugaacuuccuuccauacuugcucaucaccaguuagcauaucagcauccuuguccuggguuuggcaacggaaacagucacauucaaagcaguacuggucccucagcugcuuccggcgcuccucacuggucaucagcauauccagguagcagauggugagcuccucucccaccucgaugucucggacugcucgcaguaagagguggggcccauugaacacaaucgaacaguuggggucacagcugugauugagcaaagagauacugggauauaggccaacaccaacuuccugcaucuccgcauuacagauggugaaagaguugcagaucaccuugcccagccccgggguguccuucaccuuguugacagcccucagcaggcaggguggggcugggggaggggaggucugcagaaucccacugaagcugguugcaaagagcggugguucggcagcggaagaaguggaaggccgauguuucuucuuuuuagaagacagauuuaacuucugggcagcucgugcaaagaaggaggcggccaccgaugugccuguggaagucucgcuggccacgcaggagcccugcgaggcugggacacugcaggcggaaggcuugucugcauuguagcgguucagcacugcuucuguuagucccucccggcuacucucugucaucagcugggagaucugguauggguacagggugaccccguugguucucgacagggaccaggugccauccagguacuggugagccuggauggccaccgaauugaggauguucccauugcuuggacugguggccaucuggaggcugaccuuggccugguggguuggggacccgcucuucuuuuccgccccauugcugaccccaaggcugcuggguuugcugccgugcuuguuggcgaagccuguguaguuggagguggcacagggggcgggcacaaaggcccagucucugggcugcuggagcccacccacgugccgggaccccaccaggguggggauguuggagagcgguggcggggagcagggcgaggcgucguagugcucacugccggcugccugcuccaacgucagcaccaucuggauggccuccugcuucaacugguucaggugaguggcgcaaaugucacagcgguugucccggucguuccaugccuuccggaugguguuggggaccuggaguuugucgugaaucacagccgagaaagcaggguccuugcccgggaagggccccgggaggagcaaccucagggccugccucuugagcuccaccaggcgggcguugcaguucucgcaccagacgccgcgguccgagccgggggaggagccgccgccgcugccggagcccggggagccugugccgaagcccggagagccgcccaaggagcccggcgaacuagugccgaugccgggggaggcgggucccggggagccggugaacgagcucggggacgaggugcccgagccgggagacgggguccccgaggagccgagcgcugagcccgcgcccucaggagugggccggcugccggcgcgcgacuccucguaugcuuuccgguaccagcuuuccggggagaagggcgcugcgggcuuggugggcgagcagacuucauucaccccguauuucuugccccugguggagaccgcaagccucucuuuauucccagcuaccgaauucaugguggcuuuuccagaggagaguaucuaaagguuccaccgacgcuacauccagaagguccuccaacccagaagcgucccccggcugcagggggcuggcucucagcccucagggcaagguuucuucagcgguggggugggagggaaugaaagcaaauggaucccacaaguaauagcaccaauuugcagaaaggguuggggucgcugguuuauucuucucuucaaagcaugcuuuuccucguccccuucugccucuuccagccgcacguccucuugucacggccacauccacagaacuggcauuuucuucagccaagucaguccgugcucccccacgaggaaagcgagggauacaaucagggcucgcggccgcugccgggaaggugggagagccgagccgagucagcugugggaacuugucuccuucaccgagcuugguaacu

SEQ ID NO: 2250 - RNA, 1884 nt, Homo sapiens
gauggcauccucaaccaaauguuuugaauuuauuauaaucgugcuucucuacaacuaaugauucuugugguuugcaaaccaugucugccuuuauuuaccuacacaaacacggaacagaauuuccaauaggagagguucacacagcuaacaaagcauagagugugugaccucaauaaggcauucaacaaagacacacgccguauuucccucugacugcguucccuuaggaugcucugauguuggcgucgcauucuucuaaaaguagaaucaaaucuucaaucaggcuguguucucugccaugugucacucucauaauaucaaaagccagucucagauucuucauugcuuggggaaacaugccuugauguagcugcaguuugccaacuuucaucacuugaaccccucugacgggauggcuuccugggaaaaaaauccuguauggcuccaugguccgaguaccauagaacaaggcuuccuccaacaggccgagguugaugcaggcauccauggcgcagucgagcaccuucagcugguagauguugauaucgggaagccguucagaauugcugcuuaugauugccuggcacauggccagaaccugcucccacuuccagugugccuucaguucuucaauuuuuuucagggauucuugaacuuccuuccauacuugcucaucaccaguuagcauaucagcauccuuguccuggguuuggcaacggaaacagucacauucaaagcaguacuggucccucagcugcuuccggcgcuccucacuggucaucagcauauccagguagcagauggugagcuccucucccaccucgaugucucggacugcucgcaguaagagguggggcccauugaacacaaucgaacaguuggggucacagcugugauugagcaaagagauacugggauauaggccaacaccaacuuccugcaucuccgcauuacagauggugaaagaguugcagaucaccuugcccgggaagggccccgggaggagcaaccucagggccugccucuugagcuccaccaggcgggcguugcaguucucgcaccagacgccgcgguccgagccgggggaggagccgccgccgcugccggagcccggggagccugugccgaagcccggagagccgcccaaggagcccggcgaacuagugccgaugccgggggaggcgggucccggggagccggugaacgagcucggggacgaggugcccgagccgggagacgggguccccgaggagccgagcgcugagcccgcgcccucaggagugggccggcugccggcgcgcgacuccucguaugcuuuccgguaccagcuuuccggggagaagggcgcugcgggcuuggugggcgagcagacuucauucaccccguauuucuugccccugguggagaccgcaagccucucuuuauucccagcuaccgaauucaugguggcuuuuccagaggagaguaucuaaagguuccaccgacgcuacauccagaagguccuccaacccagaagcgucccccggcugcagggggcuggcucucagcccucagggcaagguuucuucagcgguggggugggagggaaugaaagcaaauggaucccacaaguaauagcaccaauuugcagaaaggguuggggucgcugguuuauucuucucuucaaagcaugcuuuuccucguccccuucugccucuuccagccgcacguccucuugucacggccacauccacagaacuggcauuuucuucagccaagucaguccgugcucccccacgaggaaagcgagggauacaaucagggcucgcggccgcugccgggaaggugggagagccgagccgagucagcugugggaacuugucuccuucaccgagcuugguaacu

SEQ ID NO: 2251 - RNA, 2040 nt, Homo sapiens
gauggcauccucaaccaaauguuuugaauuuauuauaaucgugcuucucuacaacuaaugauucuugugguuugcaaaccaugucugccuuuauuuaccuacacaaacacggaacagaauuuccaauaggagagguucacacagcuaacaaagcauagagugugugaccucaauaaggcauucaacaaagacacacgccguauuucccucugacugcguucccuuaggaugcucugauguuggcgucgcauucuucuaaaaguagaaucaaaucuucaaucaggcuguguucucugccaugugucacucucauaauaucaaaagccagucucagauucuucauugcuuggggaaacaugccuugauguagcugcaguuugccaacuuucaucacuugaaccccucugacgggauggcuuccugggaaaaaaauccgugcaaagaaggaggcggccaccgaugugccuguggaagucucgcuggccacgcaggagcccugcgaggcugggacacugcaggcggaaggcuugucugcauuguagcgguucagcacugcuucuguuagucccucccggcuacucucugucaucagcugggagaucugguauggguacagggugaccccguugguucucgacagggaccaggugccauccagguacuggugagccuggauggccaccgaauugaggauguucccauugcuuggacugguggccaucuggaggcugaccuuggccugguggguuggggacccgcucuucuuuuccgccccauugcugaccccaaggcugcuggguuugcugccgugcuuguuggcgaagccuguguaguuggagguggcacagggggcgggcacaaaggcccagucucugggcugcuggagcccacccacgugccgggaccccaccaggguggggauguuggagagcgguggcggggagcagggcgaggcgucguagugcucacugccggcugccugcuccaacgucagcaccaucuggauggccuccugcuucaacugguucaggugaguggcgcaaaugucacagcgguugucccggucguuccaugccuuccggaugguguuggggaccuggaguuugucgugaaucacagccgagaaagcaggguccuugcccgggaagggccccgggaggagcaaccucagggccugccucuugagcuccaccaggcgggcguugcaguucucgcaccagacgccgcgguccgagccgggggaggagccgccgccgcugccggagcccggggagccugugccgaagcccggagagccgcccaaggagcccggcgaacuagugccgaugccgggggaggcgggucccggggagccggugaacgagcucggggacgaggugcccgagccgggagacgggguccccgaggagccgagcgcugagcccgcgcccucaggagugggccggcugccggcgcgcgacuccucguaugcuuuccgguaccagcuuuccggggagaagggcgcugcgggcuuggugggcgagcagacuucauucaccccguauuucuugccccugguggagaccgcaagccucucuuuauucccagcuaccgaauucaugguggcuuuuccagaggagaguaucuaaagguuccaccgacgcuacauccagaagguccuccaacccagaagcgucccccggcugcagggggcuggcucucagcccucagggcaagguuucuucagcgguggggugggagggaaugaaagcaaauggaucccacaaguaauagcaccaauuugcagaaaggguuggggucgcugguuuauucuucucuucaaagcaugcuuuuccucguccccuucugccucuuccagccgcacguccucuugucacggccacauccacagaacuggcauuuucuucagccaagucaguccgugcucccccacgaggaaagcgagggauacaaucagggcucgcggccgcugccgggaaggugggagagccgagccgagucagcugugggaacuugucuccuucaccgagcuugguaacu

SEQ ID NO: 2252 - RNA, 1470 nt, Homo sapiens
gauggcauccucaaccaaauguuuugaauuuauuauaaucgugcuucucuacaacuaaugauucuugugguuugcaaaccaugucugccuuuauuuaccuacacaaacacggaacagaauuuccaauaggagagguucacacagcuaacaaagcauagagugugugaccucaauaaggcauucaacaaagacacacgccguauuucccucugacugcguucccuuaggaugcucugauguuggcgucgcauucuucuaaaaguagaaucaaaucuucaaucaggcuguguucucugccaugugucacucucauaauaucaaaagccagucucagauucuucauugcuuggggaaacaugccuugauguagcugcaguuugccaacuuucaucacuugaaccccucugacgggauggcuuccugggaaaaaaauccuguauggcuccaugguccgaguaccauagaacaaggcuuccuccaacaggccgagguugaugcaggcauccauggcgcagucgagcaccuucagcugguagauguugauaucgggaagccguucagaauugcugcuuaugauugccuggcacauggccagaaccugcucccacuuccagugugccuucaguucuucaauuuuuuucagggauucuugaacuuccuuccauacuugcucaucaccaguuagcauaucagcauccugguauggguacagggugaccccguugguucucgacagggaccaggugccauccagguacuggugagccuggauggccaccgaauugaggauguucccauugcuuggacugguggccaucuggaggcugaccuuggccugguggguuggggacccgcucuucuuuuccgccccauugcugaccccaaggcugcuggguuugcugccgugcuuguuggcgaagccuguguaguuggagguggcacagggggcgggcacaaaggcccagucucugggcugcuggagcccacccacgugccgggaccccaccaggguggggauguuggagagcgguggcggggagcagggcgaggcgucguagugcucacugccggcugccugcuccaacgucagcaccaucuggauggccuccugcuucaacugguucaggugaguggcgcaaaugucacagcgguugucccggucguuccaugccuuccggaugguguuggggaccuggaguuugucgugaaucacagccgagaaagcaggguccugugagguccagaauuucaccguccauccugagacaucguguuugcuuauuuggggacugaugaauuaauccuaggcuacucagccacacuucuuaccccucuuucuuccauaaugauccuuagugaaaaggucugaacugaaaauucacugagaugagcaaagcaucaccaaagcagcuuuaaauacagcaggauggugguggggagggcgggaggagcaggaagcauuucuccagg

SEQ ID NO: 2253 - RNA, 2487 nt, Homo sapiens
gauggcauccucaaccaaauguuuugaauuuauuauaaucgugcuucucuacaacuaaugauucuugugguuugcaaaccaugucugccuuuauuuaccuacacaaacacggaacagaauuuccaauaggagagguucacacagcuaacaaagcauagagugugugaccucaauaaggcauucaacaaagacacacgccguauuucccucugacugcguucccuuaggaugcucugauguuggcgucgcauucuucuaaaaguagaaucaaaucuucaaucaggcuguguucucugccaugugucacucucauaauaucaaaagccagucucagauucuucauugcuuggggaaacaugccuugauguagcugcaguuugccaacuuucaucacuugaaccccucugacgggauggcuuccugggaaaaaaauccuguauggcuccaugguccgaguaccauagaacaaggcuuccuccaacaggccgagguugaugcaggcauccauggcgcagucgagcaccuucagcugguagauguugauaucgggaagccguucagaauugcugcuuaugauugccuggcacauggccagaaccugcucccacuuccagugugccuucaguucuucaauuuuuuucagggauucuugaacuuccuuccauacuugcucaucaccaguuagcauaucagcauccuugcccagccccgggguguccuucaccuuguugacagcccucagcaggcaggguggggcugggggaggggaggucugcagaaucccacugaagcugguugcaaagagcggugguucggcagcggaagaaguggaaggccgauguuucuucuuuuuagaagacagauuuaacuucugggcagcucgugcaaagaaggaggcggccaccgaugugccuguggaagucucgcuggccacgcaggagcccugcgaggcugggacacugcaggcggaaggcuugucugcauuguagcgguucagcacugcuucuguuagucccucccggcuacucucugucaucagcugggagaucugguauggguacagggugaccccguugguucucgacagggaccaggugccauccagguacuggugagccuggauggccaccgaauugaggauguucccauugcuuggacugguggccaucuggaggcugaccuuggccugguggguuggggacccgcucuucuuuuccgccccauugcugaccccaaggcugcuggguuugcugccgugcuuguuggcgaagccuguguaguuggagguggcacagggggcgggcacaaaggcccagucucugggcugcuggagcccacccacgugccgggaccccaccaggguggggauguuggagagcgguggcggggagcagggcgaggcgucguagugcucacugccggcugccugcuccaacgucagcaccaucuggauggccuccugcuucaacugguucaggugaguggcgcaaaugucacagcgguugucccggucguuccaugccuuccggaugguguuggggaccuggaguuugucgugaaucacagccgagaaagcaggguccuugcccgggaagggccccgggaggagcaaccucagggccugccucuugagcuccaccaggcgggcguugcaguucucgcaccagacgccgcgguccgagccgggggaggagccgccgccgcugccggagcccggggagccugugccgaagcccggagagccgcccaaggagcccggcgaacuagugccgaugccgggggaggcgggucccggggagccggugaacgagcucggggacgaggugcccgagccgggagacgggguccccgaggagccgagcgcugagcccgcgcccucaggagugggccggcugccggcgcgcgacuccucguaugcuuuccgguaccagcuuuccggggagaagggcgcugcgggcuuggugggcgagcagacuucauucaccccguauuucuugccccugguggagaccgcaagccucucuuuauucccagcuaccgaauucaugguggcuuuuccagaggagaguaucuaaagguuccaccgacgcuacauccagaagguccuccaacccagaagcgucccccggcugcagggggcuggcucucagcccucagggcaagguuucuucagcgguggggugggagggaaugaaagcaaauggaucccacaaguaauagcaccaauuugcagaaaggguuggggucgcugguuuauucuucucuucaaagcaugcuuuuccucguccccuucugccucuuccagccgcacguccucuugucacggccacauccacagaacuggcauuuucuucagccaagucaguccgugcucccccacgaggaaagcgagggauacaaucagggcucgcggccgcugccgggaaggugggagagccgagccgagucagcugugggaacuugucuccuucaccgagcuugguaacu

SEQ ID NO: 2254 - skipped

SEQ ID NO: 2255 - RNA, 2598 nt, Homo sapiens
gauggcauccucaaccaaauguuuugaauuuauuauaaucgugcuucucuacaacuaaugauucuugugguuugcaaaccaugucugccuuuauuuaccuacacaaacacggaacagaauuuccaauaggagagguucacacagcuaacaaagcauagagugugugaccucaauaaggcauucaacaaagacacacgccguauuucccucugacugcguucccuuaggaugcucugauguuggcgucgcauucuucuaaaaguagaaucaaaucuucaaucaggcuguguucucugccaugugucacucucauaauaucaaaagccagucucagauucuucauugcuuggggaaacaugccuugauguagcugcaguuugccaacuuucaucacuugaaccccucugacgggauggcuuccugggaaaaaaauccuguauggcuccaugguccgaguaccauagaacaaggcuuccuccaacaggccgagguugaugcaggcauccauggcgcagucgagcaccuucagcugguagauguugauaucgggaagccguucagaauugcugcuuaugauugccuggcacauggccagaaccugcucccacuuccagugugccuucaguucuucaauuuuuuucagggauucuugaacuuccuuccauacuugcucaucaccaguuagcauaucagcauccuuguccuggguuuggcaacggaaacagucacauucaaagcaguacuggucccucagcugcuuccggcgcuccucacuggucaucagcauauccagguagcagauggugagcuugcccagccccgggguguccuucaccuuguugacagcccucagcaggcaggguggggcugggggaggggaggucugcagaaucccacugaagcugguugcaaagagcggugguucggcagcggaagaaguggaaggccgauguuucuucuuuuuagaagacagauuuaacuucugggcagcucgugcaaagaaggaggcggccaccgaugugccuguggaagucucgcuggccacgcaggagcccugcgaggcugggacacugcaggcggaaggcuugucugcauuguagcgguucagcacugcuucuguuagucccucccggcuacucucugucaucagcugggagaucugguauggguacagggugaccccguugguucucgacagggaccaggugccauccagguacuggugagccuggauggccaccgaauugaggauguucccauugcuuggacugguggccaucuggaggcugaccuuggccugguggguuggggacccgcucuucuuuuccgccccauugcugaccccaaggcugcuggguuugcugccgugcuuguuggcgaagccuguguaguuggagguggcacagggggcgggcacaaaggcccagucucugggcugcuggagcccacccacgugccgggaccccaccaggguggggauguuggagagcgguggcggggagcagggcgaggcgucguagugcucacugccggcugccugcuccaacgucagcaccaucuggauggccuccugcuucaacugguucaggugaguggcgcaaaugucacagcgguugucccggucguuccaugccuuccggaugguguuggggaccuggaguuugucgugaaucacagccgagaaagcaggguccuugcccgggaagggccccgggaggagcaaccucagggccugccucuugagcuccaccaggcgggcguugcaguucucgcaccagacgccgcgguccgagccgggggaggagccgccgccgcugccggagcccggggagccugugccgaagcccggagagccgcccaaggagcccggcgaacuagugccgaugccgggggaggcgggucccggggagccggugaacgagcucggggacgaggugcccgagccgggagacgggguccccgaggagccgagcgcugagcccgcgcccucaggagugggccggcugccggcgcgcgacuccucguaugcuuuccgguaccagcuuuccggggagaagggcgcugcgggcuuggugggcgagcagacuucauucaccccguauuucuugccccugguggagaccgcaagccucucuuuauucccagcuaccgaauucaugguggcuuuuccagaggagaguaucuaaagguuccaccgacgcuacauccagaagguccuccaacccagaagcgucccccggcugcagggggcuggcucucagcccucagggcaagguuucuucagcgguggggugggagggaaugaaagcaaauggaucccacaaguaauagcaccaauuugcagaaaggguuggggucgcugguuuauucuucucuucaaagcaugcuuuuccucguccccuucugccucuuccagccgcacguccucuugucacggccacauccacagaacuggcauuuucuucagccaagucaguccgugcucccccacgaggaaagcgagggauacaaucagggcucgcggccgcugccgggaaggugggagagccgagccgagucagcugugggaacuugucuccuucaccgagcuugguaacu

SEQ ID NO: 2256 - RNA, 2136 nt, Homo sapiens
gauggcauccucaaccaaauguuuugaauuuauuauaaucgugcuucucuacaacuaaugauucuugugguuugcaaaccaugucugccuuuauuuaccuacacaaacacggaacagaauuuccaauaggagagguucacacagcuaacaaagcauagagugugugaccucaauaaggcauucaacaaagacacacgccguauuucccucugacugcguucccuuaggaugcucugauguuggcgucgcauucuucuaaaaguagaaucaaaucuucaaucaggcuguguucucugccaugugucacucucauaauaucaaaagccagucucagauucuucauugcuuggggaaacaugccuugauguagcugcaguuugccaacuuucaucacuugaaccccucugacgggauggcuuccugggaaaaaaauccuguauggcuccaugguccgaguaccauagaacaaggcuuccuccaacaggccgagguugaugcaggcauccauggcgcagucgagcaccuucagcugguagauguugauaucgggaagccguucagaauugcugcuuaugauugccuggcacauggccagaaccugcucccacuuccagugugccuucaguucuucaauuuuuuucagggauucuugaacuuccuuccauacuugcucaucaccaguuagcauaucagcauccugguauggguacagggugaccccguugguucucgacagggaccaggugccauccagguacuggugagccuggauggccaccgaauugaggauguucccauugcuuggacugguggccaucuggaggcugaccuuggccugguggguuggggacccgcucuucuuuuccgccccauugcugaccccaaggcugcuggguuugcugccgugcuuguuggcgaagccuguguaguuggagguggcacagggggcgggcacaaaggcccagucucugggcugcuggagcccacccacgugccgggaccccaccaggguggggauguuggagagcgguggcggggagcagggcgaggcgucguagugcucacugccggcugccugcuccaacgucagcaccaucuggauggccuccugcuucaacugguucaggugaguggcgcaaaugucacagcgguugucccggucguuccaugccuuccggaugguguuggggaccuggaguuugucgugaaucacagccgagaaagcaggguccuugcccgggaagggccccgggaggagcaaccucagggccugccucuugagcuccaccaggcgggcguugcaguucucgcaccagacgccgcgguccgagccgggggaggagccgccgccgcugccggagcccggggagccugugccgaagcccggagagccgcccaaggagcccggcgaacuagugccgaugccgggggaggcgggucccggggagccggugaacgagcucggggacgaggugcccgagccgggagacgggguccccgaggagccgagcgcugagcccgcgcccucaggagugggccggcugccggcgcgcgacuccucguaugcuuuccgguaccagcuuuccggggagaagggcgcugcgggcuuggugggcgagcagacuucauucaccccguauuucuugccccugguggagaccgcaagccucucuuuauucccagcuaccgaauucaugguggcuuuuccagaggagaguaucuaaagguuccaccgacgcuacauccagaagguccuccaacccagaagcgucccccggcugcagggggcuggcucucagcccucagggcaagguuucuucagcgguggggugggagggaaugaaagcaaauggaucccacaaguaauagcaccaauuugcagaaaggguuggggucgcugguuuauucuucucuucaaagcaugcuuuuccucguccccuucugccucuuccagccgcacguccucuugucacggccacauccacagaacuggcauuuucuucagccaagucaguccgugcucccccacgaggaaagcgagggauacaaucagggcucgcggccgcugccgggaaggugggagagccgagccgagucagcugugggaacuugucuccuucaccgagcuugguaacu

SEQ ID NO: 2257 - RNA, 1290 nt, Homo sapiens
gauggcauccucaaccaaauguuuugaauuuauuauaaucgugcuucucuacaacuaaugauucuugugguuugcaaaccaugucugccuuuauuuaccuacacaaacacggaacagaauuuccaauaggagagguucacacagcuaacaaagcauagagugugugaccucaauaaggcauucaacaaagacacacgccguauuucccucugacugcguucccuuaggaugcucugauguuggcgucgcauucuucuaaaaguagaaucaaaucuucaaucaggcuguguucucugccaugugucacucucauaauaucaaaagccagucucagauucuucauugcuuggggaaacaugccuugauguagcugcaguuugccaacuuucaucacuugaaccccucugacgggauggcuuccugggaaaaaaauccuguauggcuccaugguccgaguaccauagaacaaggcuuccuccaacaggccgagguugaugcaggcauccauggcgcagucgagcaccuucagcugguagauguugauaucgggaagccguucagaauugcugcuuaugauugccuggcacauggccagaaccugcucccacuuccagugugccuucaguucuucaauuuuuuucagggauucuugaacuuccuuccauacuugcucaucaccaguuagcauaucagcauccuuguccuggguuuggcaacggaaacagucacauucaaagcaguacuggucccucagcugcuuccggcgcuccucacuggucaucagcauauccagguagcagauggugagcuccucucccaccucgaugucucggacugcucgcaguaagagguggggcccauugaacacaaucgaacaguuggggucacagcugugauugagcaaagagauacugggauauaggccaacaccaacuuccugcaucuccgcauuacagauggugaaagaguugcagaucaccuugcccagccccgggguguccuucaccuuguugacagcccucagcaggcaggguggggcugggggaggggaggucugcagaaucccacugaagcugguugcaaagagcggugguucggcagcggaagaaguggaaggccgauguuucuucuuuuuagaagacagauuuaacuucugggcagcuacugcuuuccaauccaucaucauugauaagucauggcuaaauaaucaagugcagaauccauuucuucacgucugcuaauaaauagcuucucucaaaugucucuugcagaucuggggccaucucagga

SEQ ID NO: 2258 - skipped

SEQ ID NO: 2259 - RNA, 1119 nt, Homo sapiens
gauggcauccucaaccaaauguuuugaauuuauuauaaucgugcuucucuacaacuaaugauucuugugguuugcaaaccaugucugccuuuauuuaccuacacaaacacggaacagaauuuccaauaggagagguucacacagcuaacaaagcauagagugugugaccucaauaaggcauucaacaaagacacacgccguauuucccucugacugcguucccuuaggaugcucugauguuggcgucgcauucuucuaaaaguagaaucaaaucuucaaucaggcuguguucucugccaugugucacucucauaauaucaaaagccagucucagauucuucauugcuuggggaaacaugccuugauguagcugcaguuugccaacuuucaucacuugaaccccucugacgggauggcuuccugggaaaaaaauccuguauggcuccaugguccgaguaccauagaacaaggcuuccuccaacaggccgagguugaugcaggcauccauggcgcagucgagcaccuucagcugguagauguugauaucgggaagccguucagaauugcugcuuaugauugccuggcacauggccagaaccugcucccacuuccagugugccuucaguucuucaauuuuuuucagggauucuugaacuuccuuccauacuugcucaucaccaguuagcauaucagcauccuuguccuggguuuggcaacggaaacagucacauucaaagcaguacuggucccucagcugcuuccggcgcuccucacuggucaucagcauauccagguagcagauggugagcuugcccagccccgggguguccuucaccuuguugacagcccucagcaggcaggguggggcugggggaggggaggucugcagaaucccacugaagcugguugcaaagagcggugguucggcagcggaagaaguggaaggccgauguuucuucuuuuuagaagacagauuuaacuucugggcagcuacugcuuuccaauccaucaucauugauaagucauggcuaaauaaucaagugcagaauccauuucuucacgucugcuaauaaauagcuucucucaaaugucucuugcagaucuggggccaucucagga

SEQ ID NO: 2260 - RNA, 1008 nt, Homo sapiens
gauggcauccucaaccaaauguuuugaauuuauuauaaucgugcuucucuacaacuaaugauucuugugguuugcaaaccaugucugccuuuauuuaccuacacaaacacggaacagaauuuccaauaggagagguucacacagcuaacaaagcauagagugugugaccucaauaaggcauucaacaaagacacacgccguauuucccucugacugcguucccuuaggaugcucugauguuggcgucgcauucuucuaaaaguagaaucaaaucuucaaucaggcuguguucucugccaugugucacucucauaauaucaaaagccagucucagauucuucauugcuuggggaaacaugccuugauguagcugcaguuugccaacuuucaucacuugaaccccucugacgggauggcuuccugggaaaaaaauccuguauggcuccaugguccgaguaccauagaacaaggcuuccuccaacaggccgagguugaugcaggcauccauggcgcagucgagcaccuucagcugguagauguugauaucgggaagccguucagaauugcugcuuaugauugccuggcacauggccagaaccugcucccacuuccagugugccuucaguucuucaauuuuuuucagggauucuugaacuuccuuccauacuugcucaucaccaguuagcauaucagcauccuugcccagccccgggguguccuucaccuuguugacagcccucagcaggcaggguggggcugggggaggggaggucugcagaaucccacugaagcugguugcaaagagcggugguucggcagcggaagaaguggaaggccgauguuucuucuuuuuagaagacagauuuaacuucugggcagcuacugcuuuccaauccaucaucauugauaagucauggcuaaauaaucaagugcagaauccauuucuucacgucugcuaauaaauagcuucucucaaaugucucuugcagaucuggggccaucucagga

SEQ ID NO: 2261-2265 - skipped (5 entries)

SEQ ID NO: 2266 - RNA, 4263 nt, Homo sapiens
ugugguacaauucucauauuuuauuuuguuaaugcaugauaaaaaauuaacgucaucauucagauccauuauuuggaaugaagaauuuaguauuuccugacugccuaauuuggcacuuugaggaauuuccucugcacgcugagccccaaaaugcacuauuuucuagaccaaaaaugaaaacgugcguauauacaagugagcugaaaaguuacaacacaagaugaucauuuuggugaaaaauaauccccccaaauaagcagcaugucauguccuuagaauauguuacacuagaaagcuaguaaaaauucaggcuaaggaggcaauuuagaguucaaguuuuaucacauaucagcaaaguuuuagccuucccuuaaaaacagacaccuucaaagugaaaucuugccagaaggguugauuuuuaauuauguguauauacaaacuucucuauuuuaacauucaacauauucaggauuaauucuagaaagaugcuauagcugauuuauaaaacaaaaugauuuaggaucagaaagaaaauaggggcacacaauuucauguagucucucccuaacuacccccaaccauagcaucacaagguuuuuuuuuuuccuaaugccacaauugaaaccuguauuaacuuaaaaguugacacuaaaggcaggaauuaagaagucauuuuuuauggcuuuuaagcacuugaaugcuuuagaacccccuugaaaaugcuagugaacaggucuuauuccuuuaaauguugcuuugauuugaaucuuggugaaaucuagauucccuauuaaauagcugcaugcuaauuuuggagaaaguacaauuuaaaaccuuuaacaacuacucuauugacucugaagaaggggacuuuagcaugucgcuguuugggcuagagaagcauuucaacaccuuucugcaaacuaagauaaaaaacaaugaaugagagcuacaaauagaaaucuaguaaggcaguucuaucauguaggaaaaugguuucccaaauguuuucuacacugacauuuuuuaaaaaagauaugauacccgguucuuccacauucaguguauaaaacucaacuuuagacauguaugugcggagaagacucguauguccaaaaccauccauuugcauggcaaucuugucuuugcauugcuuugugucauucuggcuucccucacccacaggccacuggagggcugggaggcccaggagcucagcacucuaacuccuccaugacuuccaugacaaucguccgugggcccgucagaaucagauugcucacgguccgguagucuacaugcaggacauugagcccguugacagagacgacaaacugacagaccuucauuccugcugcggcugcagggccacuggggucuacagccuggauguggcauggcuuacuuccucgcaccacaaaaccccagccaaccgcgucaccaacaaucgugaaugucuuccuugcauacggagccccgggaguaaggaguuccucagaggugacaggucucuucagcaagguuuuuccaggagcggagacgcugacgccuucgccauccguguagaugggagucacugugacuuuguauucaguaucaggaagcagaggcuucagaaggagguuguucuggcuuccaggcaccauaaccguuccuaugacuucuuccucaggguccccuugagcugucauguaggucacccuaaacugcugcacaucgcugucagaaaugucccauuuuacccgcaggcuagaaguaguuucaucaccuacaacuagguuucugauucccgucuggaaaacugaagucacagaugugguaggcacuaugguuguagcugguucuguccaaaaacugucaaguguggucccgacagcagucaccaccucacucucgcuuccaucaucaaguacggccaauagugaaacuucauacuccguaccgggcuccaggccuucaauaacaugugaguccugcucuucuuucaggacaaccuccucagucuuccccccauagacuggaauccacaucaauuuguguagcccuucaucagcugagaggggaugccaggucacccuaaaacugucugucgucaccucaucaauuucuaaguauugcugggcuggaacuuccucggugguaaaaacuccagucagaggcucugacuguccuucaucauagauggagaaaauagcaauaguauacucugugagaggugucaagcccuucagagggaagguaguaauaggaucgacuucaaccucauugauuucagucccaucugcauuguuauauacaauucgauaaccauugaucugucuugaaguugggucccagguuaaucgagcacuguuagagccaacauuggagauucucagguuucuugguggacuuaaagccaauguuguuucuugucccguaacaggaucacuggccucuucuccaaacauggcauaaacugugacuguguauucuguauugggcaacaacccacucaauucaauaucugugugggucucuccaauuuucaucucuuuuucauccccagccaggcccucuguuagaggagcauaaaggaucagguaaccugaggccccaggcacugcaucccauuugacucgcaugcuguucucagucacgucguacaguagaaggucagaagccaucgguaaagcaaguguaguuucaguuccccguaggccuucacuagcagugugggcauagauugcaaagacugcuaucugauauucaguuaaagacaucaaguuuuucaacacuguggaagauacaguuccaucuaccaccaccucgucugguuuuccaccccugguaggauaauacacaacucuguauuuuuccacauuuccuggggcaugaguccaguuaaccauaaagcuucuggcagugacuucagaaguaaucaacuccguaggcggcccagugauggcaugggcugaggcuuuaauuucucuguccuguucuuccacucuagagcagagaguccuggucagacucuccacaacugugugcaucagaucgaauucggcaacauuguacacaugagugcugucugguucagaggcgaucuccugcagcucauucacauccgcguuuuucaccccuauggcaaacaguucuacaccagacucacgaagauuucuagaugguggaauaaugucaucuugggauuuuccaucugugauuaaaaugccaauuuuggauacuccaguccuugauccugcuucugguuugaagcuauuuucaaaaauguaguucaaagcaagaccuguuaguguauuuccuccuuuauaugggagguuucggacagcuucaaucacuucaucuuuugugcuaaaugcauucaagugccauucuauucuggggucaccacuauacugugcaagaccaauucgugucuucucugagcccacaucgaaugcuguaaccagguuuuccaagaaaugccgaaccagucugaaguugaaucuuccaauacuccaugaaccaucgaccaggauuacaaugucagcaauugcuggaguuugacagacaaauuucacuucuucuggugaagauggucuacucccauuuccucuguccacaacuuugacucugggcuuuggauccuuucuuuuuucuaaaucuuuaauucugaauuggccuugagcuggcuugcuuucuuuaucuuuauuguaugcaauaauuugaacuguguaauucuggucuggcauaaggccuugaauaauugcuuuaguugcaguguucugcagauucagcugguuaguuuuuccaccugaaguuggagucacaagaaguuuguaaccaccaaauuucccucuuggagccuuccaugaaaucuguauacugucaugagauauuacauuauaucuuaaccuuguggguggagccacuugaccuuggacaauggugcagaaauaaacaauugccaaaaaagguggaagcaaccaguaccgcaucuugcgcuggaaaaucuucauuuuauuuuccgcuuuuuacaugggguguagcagccaccugugcugggcaagguuccagcccagguugggagcucuccgcgccuaggcaagaucgaagcuccgccgcuaguugguccuuggcggcgcaccgcccuugcucucuucccucggaguauccuuuuuuaauuagccucucucucuuucucucucccucuccuucugccgcugcgcuuccacuuccagcccccuggagcugccuccgccucuccagcugggagcccaggau

SEQ ID NO: 2267 - RNA, 3562 nt, Homo sapiens
ugugguacaauucucauauuuuauuuuguuaaugcaugauaaaaaauuaacgucaucauucagauccauuauuuggaaugaagaauuuaguauuuccugacugccuaauuuggcacuuugaggaauuuccucugcacgcugagccccaaaaugcacuauuuucuagaccaaaaaugaaaacgugcguauauacaagugagcugaaaaguuacaacacaagaugaucauuuuggugaaaaauaauccccccaaauaagcagcaugucauguccuuagaauauguuacacuagaaagcuaguaaaaauucaggcuaaggaggcaauuuagaguucaaguuuuaucacauaucagcaaaguuuuagccuucccuuaaaaacagacaccuucaaagugaaaucuugccagaaggguugauuuuuaauuauguguauauacaaacuucucuauuuuaacauucaacauauucaggauuaauucuagaaagaugcuauagcugauuuauaaaacaaaaugauuuaggaucagaaagaaaauaggggcacacaauuucauguagucucucccuaacuacccccaaccauagcaucacaagguuuuuuuuuuuccuaaugccacaauugaaaccuguauuaacuuaaaaguugacacuaaaggcaggaauuaagaagucauuuuuuauggcuuuuaagcacuugaaugcuuuagaacccccuugaaaaugcuagugaacaggucuuauuccuuuaaauguugcuuugauuugaaucuuggugaaaucuagauucccuauuaaauagcugcaugcuaauuuuggagaaaguacaauuuaaaaccuuuaacaacuacucuauugacucugaagaaggggacuuuagcaugucgcuguuugggcuagagaagcauuucaacaccuuucugcaaacuaagauaaaaaacaaugaaugagagcuacaaauagaaaucuaguaaggcaguucuaucauguaggaaaaugguuucccaaauguuuucuacacugacauuuuuuaaaaaagauaugauacccgguucuuccacauucaguguauaaaacucaacuuuagacauguaugugcggagaagacucguauguccaaaaccauccauuugcauggcaaucuugucuuugcauugcuuugugucauucuggcuucccucacccacaggccacuggagggcugggaggcccaggagcucagcacucuaacuccuccaugacuuccaugacaaucguccgugggcccgucagaaucagauugcucacgguccgguagucuacaugcaggacauugagcccguugacagagacgacaaacugacagaccuucauuccugcugcggcugcagggccacuggggucuacagccuggauguggcauggcuuacuuccucgcaccacaaaaccccagccaaccgcgucaccaacaaucgugaaugucuuccuugcauacggagccccgggaguaaggaguuccucagaggugacaggucucuucagcaagguuuuuccaggagcggagacgcugacgccuucgccauccguguagaugggagucacugugacuuuguauucaguaucaggaagcagaggcuucagaaggagguuguucuggcuuccaggcaccauaaccguuccuaugacuucuuccucaggguccccuugagcugucauguaggucacccuaaacugcugcacaucgcugucagaaaugucccauuuuacccgcaggcuagaaguaguuucaucaccuacaacuagguuucugauucccgucuggaaaacugaagucacagaugugguaggcacuaugguuguagcugguucuguccaaaaacugucaaguguggucccgacagcagucaccaccucacucucgcuuccaucaucaaguacggccaauagugaaacuucauacuccguaccgggcuccaggccuucaauaacaugugaguccugcucuucuuucaggacaaccuccucagucuuccccccauagacuggaauccacaucaauuuguguagcccuucaucagcugagaggggaugccaggucacccuaaaacugucugucgucaccucaucaauuucuaaguauugcugggcuggaacuuccucggugguaaaaacuccagucagaggcucugacuguccuucaucauagauggagaaaauagcaauaguauacucugugagaggugucaagcccuucagagggaagguaguaauaggaucgacuucaaccucauugauuucagucccaucugcauuguuauauacaauucgauaaccauugaucugucuugaaguugggucccagguuaaucgagcacuguuagagccaacauuggagauucucagguuucuugguggacuuaaagccaauguuguuucuugucccguaacaggaucacuggccucuucuccaaacauggcauaaacugugacuguguauucuguauugggcaacaacccacucaauucaauaucugugugggucucuccaauuuucaucucuuuuucauccccagccaggcccucuguuagaggagcauaaaggaucagguaaccugaggccccaggcacugcaucccauuugacucgcaugcuguucucagucacgucguacaguagaaggucagaagccaucgguaaagcaaguguaguuucaguuccccguaggccuucacuagcagugugggcauagauugcaaagacugcuaucugauauucaguuaaagacaucaaguuuuucaacacuguggaagauacaguuccaucuaccaccaccucgucugguuuuccaccccugguaggauaauacacaacucuguauuuuuccacauuuccuggggcaugaguccaguuaaccauaaagcuucuggcagugacuucagaaguaaucaacuccguaggcggcccagugauggcaugggcugaggcuuuaauuucucuguccuguucuuccacucuagagcagagaguccuggucagacucuccacaacugugugcaucagaucgaauucggcaacauuguacacaugagugcugucugguucagaggcgaucuccugcagcucauucacauccgcguuuuucaccccuauggcaaacaguucuacaccagacucacgaagauuucuagaugguggaauaaugucaucuugggauuuuccaucugugauuaaaaugccaauuuuggauacuccaguccuugauccugcuucugguuugaagcuauuuucaaaaauguaguucaaagcaagaccuguuaguguauuuccuccuuuauaugggagguuucggacagcuucaaucacuucaucuuuugugcuaaaugcauucaagugccauucuauucuggggucaccacuauacugugcaagaccaauucgugucuucucugagcccacaucgaaugcuguaaccagguuuuccaagaaaugccgaaccagucugaaguugaaucuuccaauacuccaugaaccaucgaccaggauuacaaugucagcaauugcuggaguuugacagacaaauuucacuu

SEQ ID NO: 2268 - RNA, 3345 nt, Homo sapiens
ugugguacaauucucauauuuuauuuuguuaaugcaugauaaaaaauuaacgucaucauucagauccauuauuuggaaugaagaauuuaguauuuccugacugccuaauuuggcacuuugaggaauuuccucugcacgcugagccccaaaaugcacuauuuucuagaccaaaaaugaaaacgugcguauauacaagugagcugaaaaguuacaacacaagaugaucauuuuggugaaaaauaauccccccaaauaagcagcaugucauguccuuagaauauguuacacuagaaagcuaguaaaaauucaggcuaaggaggcaauuuagaguucaaguuuuaucacauaucagcaaaguuuuagccuucccuuaaaaacagacaccuucaaagugaaaucuugccagaaggguugauuuuuaauuauguguauauacaaacuucucuauuuuaacauucaacauauucaggauuaauucuagaaagaugcuauagcugauuuauaaaacaaaaugauuuaggaucagaaagaaaauaggggcacacaauuucauguagucucucccuaacuacccccaaccauagcaucacaagguuuuuuuuuuuccuaaugccacaauugaaaccuguauuaacuuaaaaguugacacuaaaggcaggaauuaagaagucauuuuuuauggcuuuuaagcacuugaaugcuuuagaacccccuugaaaaugcuagugaacaggucuuauuccuuuaaauguugcuuugauuugaaucuuggugaaaucuagauucccuauuaaauagcugcaugcuaauuuuggagaaaguacaauuuaaaaccuuuaacaacuacucuauugacucugaagaaggggacuuuagcaugucgcuguuugggcuagagaagcauuucaacaccuuucugcaaacuaagauaaaaaacaaugaaugagagcuacaaauagaaaucuaguaaggcaguucuaucauguaggaaaaugguuucccaaauguuuucuacacugacauuuuuuaaaaaagauaugauacccgguucuuccacauucaguguauaaaacucaacuuuagacauguaugugcggagaagacucguauguccaaaaccauccauuugcauggcaaucuugucuuugcauugcuuugugucauucuggcuucccucacccacaggccacuggagggcugggaggcccaggagcucagcacucuaacuccuccaugacuuccaugacaaucguccgugggcccgucagaaucagauugcucacgguccgguagucuacaugcaggacauugagcccguugacagagacgacaaacugacagaccucauugauuucagucccaucugcauuguuauauacaauucgauaaccauugaucugucuugaaguugggucccagguuaaucgagcacuguuagagccaacauuggagauucucagguuucuugguggacuuaaagccaauguuguuucuugucccguaacaggaucacuggccucuucuccaaacauggcauaaacugugacuguguauucuguauugggcaacaacccacucaauucaauaucugugugggucucuccaauuuucaucucuuuuucauccccagccaggcccucuguuagaggagcauaaaggaucagguaaccugaggccccaggcacugcaucccauuugacucgcaugcuguucucagucacgucguacaguagaaggucagaagccaucgguaaagcaaguguaguuucaguuccccguaggccuucacuagcagugugggcauagauugcaaagacugcuaucugauauucaguuaaagacaucaaguuuuucaacacuguggaagauacaguuccaucuaccaccaccucgucugguuuuccaccccugguaggauaauacacaacucuguauuuuuccacauuuccuggggcaugaguccaguuaaccauaaagcuucuggcagugacuucagaaguaaucaacuccguaggcggcccagugauggcaugggcugaggcuuuaauuucucuguccuguucuuccacucuagagcagagaguccuggucagacucuccacaacugugugcaucagaucgaauucggcaacauuguacacaugagugcugucugguucagaggcgaucuccugcagcucauucacauccgcguuuuucaccccuauggcaaacaguucuacaccagacucacgaagauuucuagaugguggaauaaugucaucuugggauuuuccaucugugauuaaaaugccaauuuuggauacuccaguccuugauccugcuucugguuugaagcuauuuucaaaaauguaguucaaagcaagaccuguuaguguauuuccuccuuuauaugggagguuucggacagcuucaaucacuucaucuuuugugcuaaaugcauucaagugccauucuauucuggggucaccacuauacugugcaagaccaauucgugucuucucugagcccacaucgaaugcuguaaccagguuuuccaagaaaugccgaaccagucugaaguugaaucuuccaauacuccaugaaccaucgaccaggauuacaaugucagcaauugcuggaguuugacagacaaauuucacuucuucuggugaagauggucuacucccauuuccucuguccacaacuuugacucugggcuuuggauccuuucuuuuuucuaaaucuuuaauucugaauuggccuugagcuggcuugcuuucuuuaucuuuauuguaugcaauaauuugaacuguguaauucuggucuggcauaaggccuugaauaauugcuuuaguugcaguguucugcagauucagcugguuaguuuuuccaccugaaguuggagucacaagaaguuuguaaccaccaaauuucccucuuggagccuuccaugaaaucuguauacugucaugagauauuacauuauaucuuaaccuuguggguggagccacuugaccuuggacaauggugcagaaauaaacaauugccaaaaaagguggaagcaaccaguaccgcaucuugcgcuggaaaaucuucauuuuauuuuccgcuuuuuacaugggguguagcagccaccugugcugggcaagguuccagcccagguugggagcucuccgcgccuaggcaagaucgaagcuccgccgcuaguugguccuuggcggcgcaccgcccuugcucucuucccucggaguauccuuuuuuaauuagccucucucucuuucucucucccucuccuucugccgcugcgcuuccacuuccagcccccuggagcugccuccgccucuccagcugggagcccaggau

SEQ ID NO: 2269 - RNA, 2310 nt, Homo sapiens
ugugguacaauucucauauuuuauuuuguuaaugcaugauaaaaaauuaacgucaucauucagauccauuauuuggaaugaagaauuuaguauuuccugacugccuaauuuggcacuuugaggaauuuccucugcacgcugagccccaaaaugcacuauuuucuagaccaaaaaugaaaacgugcguauauacaagugagcugaaaaguuacaacacaagaugaucauuuuggugaaaaauaauccccccaaauaagcagcaugucauguccuuagaauauguuacacuagaaagcuaguaaaaauucaggcuaaggaggcaauuuagaguucaaguuuuaucacauaucagcaaaguuuuagccuucccuuaaaaacagacaccuucaaagugaaaucuugccagaaggguugauuuuuaauuauguguauauacaaacuucucuauuuuaacauucaacauauucaggauuaauucuagaaagaugcuauagcugauuuauaaaacaaaaugauuuaggaucagaaagaaaauaggggcacacaauuucauguagucucucccuaacuacccccaaccauagcaucacaagguuuuuuuuuuuccuaaugccacaauugaaaccuguauuaacuuaaaaguugacacuaaaggcaggaauuaagaagucauuuuuuauggcuuuuaagcacuugaaugcuuuagaacccccuugaaaaugcuagugaacaggucuuauuccuuuaaauguugcuuugauuugaaucuuggugaaaucuagauucccuauuaaauagcugcaugcuaauuuuggagaaaguacaauuuaaaaccuuuaacaacuacucuauugacucugaagaaggggacuuuagcaugucgcuguuugggcuagagaagcauuucaacaccuuucugcaaacuaagauaaaaaacaaugaaugagagcuacaaauagaaaucuaguaaggcaguucuaucauguaggaaaaugguuucccaaauguuuucuacacugacauuuuuuaaaaaagauaugauacccgguucuuccacauucaguguauaaaacucaacuuuagacauguaugugcggagaagacucguauguccaaaaccauccauuugcauggcaaucuugucuuugcauugcuuugugucauucuggcuucccucacccacaggccacuggagggcugggaggcccaggagcucagcacucuaacuccuccaugacuuccaugacaaucguccgugggcccgucagaaucagauugcucacgguccgguagucuacaugcaggacauugagcccguugacagagacgacaaacugacagaccuucauuccugcugcggcugcagggccacuggggucuacagccuggauguggcauggcuuacuuccucgcaccacaaaaccccagccaaccgcgucaccaacaaucgugaaugucuuccuugcauacggagccccgggaguaaggaguuccucagaggugacaggucucuucagcacggacuugggguugcagagcacaggggggcugcugcugaggguggggcugcugcugaaguagccgcugcugccacagcugcucaugcugcuucuccucacugcagacacgaucuugaucuccuugcuggggcucacugacauaaagcugguagauuuccgauugucauggcucugcuuccucaggcagaagggacugucaugaguuuccugggaggagggggacuuuucauugagcagcuccaucagucuucgccuccgccggaaguucauucugaacugguagagaagauugcuguccacaaaugggugcuuguuggacacugaaguuggagucacaagaaguuuguaaccaccaaauuucccucuuggagccuuccaugaaaucuguauacugucaugagauauuacauuauaucuuaaccuuguggguggagccacuugaccuuggacaauggugcagaaauaaacaauugccaaaaaagguggaagcaaccaguaccgcaucuugcgcuggaaaaucuucauuuuauuuuccgcuuuuuacaugggguguagcagccaccugugcugggcaagguuccagcccagguugggagcucuccgcgccuaggcaagaucgaagcuccgccgcuaguugguccuuggcggcgcaccgcccuugcucucuucccucggaguauccuuuuuuaauuagccucucucucuuucucucucccucuccuucugccgcugcgcuuccacuuccagcccccuggagcugccuccgccucuccagcugggagcccaggau

SEQ ID NO: 2270 - RNA, 2193 nt, Homo sapiens
ugugguacaauucucauauuuuauuuuguuaaugcaugauaaaaaauuaacgucaucauucagauccauuauuuggaaugaagaauuuaguauuuccugacugccuaauuuggcacuuugaggaauuuccucugcacgcugagccccaaaaugcacuauuuucuagaccaaaaaugaaaacgugcguauauacaagugagcugaaaaguuacaacacaagaugaucauuuuggugaaaaauaauccccccaaauaagcagcaugucauguccuuagaauauguuacacuagaaagcuaguaaaaauucaggcuaaggaggcaauuuagaguucaaguuuuaucacauaucagcaaaguuuuagccuucccuuaaaaacagacaccuucaaagugaaaucuugccagaaggguugauuuuuaauuauguguauauacaaacuucucuauuuuaacauucaacauauucaggauuaauucuagaaagaugcuauagcugauuuauaaaacaaaaugauuuaggaucagaaagaaaauaggggcacacaauuucauguagucucucccuaacuacccccaaccauagcaucacaagguuuuuuuuuuuccuaaugccacaauugaaaccuguauuaacuuaaaaguugacacuaaaggcaggaauuaagaagucauuuuuuauggcuuuuaagcacuugaaugcuuuagaacccccuugaaaaugcuagugaacaggucuuauuccuuuaaauguugcuuugauuugaaucuuggugaaaucuagauucccuauuaaauagcugcaugcuaauuuuggagaaaguacaauuuaaaaccuuuaacaacuacucuauugacucugaagaaggggacuuuagcaugucgcuguuugggcuagagaagcauuucaacaccuuucugcaaacuaagauaaaaaacaaugaaugagagcuacaaauagaaaucuaguaaggcaguucuaucauguaggaaaaugguuucccaaauguuuucuacacugacauuuuuuaaaaaagauaugauacccgguucuuccacauucaguguauaaaacucaacuuuagacauguaugugcggagaagacucguauguccaaaaccauccauuugcauggcaaucuugucuuugcauugcuuugugucauucuggcuucccucacccacaggccacuggagggcugggaggcccaggagcucagcacucuaacuccuccaugacuuccaugacaaucguccgugggcccgucagaaucagauugcucacgguccgguagucuacaugcaggacauugagcccguugacagagacgacaaacugacagaccuucauuccugcugcggcugcagggccacuggggucuacagccuggauguggcauggcuuacuuccucgcaccacaaaaccccagccaaccgcgucaccaacaaucgugaaugucuuccuugcauacggagccccgggaguaaggaguuccucagaggugacaggucucuucagcacggacuugggguugcagagcacaggggggcugcugcugaggguggggcugcugcugaaguagccgcugcugccacagcugcucaugcugcuucuccucacugcagacacgaucuugaucuccuugcuggggcucacugacauaaagcugguagauuuccgauugucauggcucugcuuccucaggcagaagggacugucaugaguuuccugggaggagggggacuuuucauugagcagcuccaucagucuucgccuccgccggaaguucauucugaacugguagagaagauugcuguccacaaaugggugcuuguuggacacuugaccuuggacaauggugcagaaauaaacaauugccaaaaaagguggaagcaaccaguaccgcaucuugcgcuggaaaaucuucauuuuauuuuccgcuuuuuacaugggguguagcagccaccugugcugggcaagguuccagcccagguugggagcucuccgcgccuaggcaagaucgaagcuccgccgcuaguugguccuuggcggcgcaccgcccuugcucucuucccucggaguauccuuuuuuaauuagccucucucucuuucucucucccucuccuucugccgcugcgcuuccacuuccagcccccuggagcugccuccgccucuccagcugggagcccaggau

SEQ ID NO: 2271 - RNA, 2982 nt, Homo sapiens
ugugguacaauucucauauuuuauuuuguuaaugcaugauaaaaaauuaacgucaucauucagauccauuauuuggaaugaagaauuuaguauuuccugacugccuaauuuggcacuuugaggaauuuccucugcacgcugagccccaaaaugcacuauuuucuagaccaaaaaugaaaacgugcguauauacaagugagcugaaaaguuacaacacaagaugaucauuuuggugaaaaauaauccccccaaauaagcagcaugucauguccuuagaauauguuacacuagaaagcuaguaaaaauucaggcuaaggaggcaauuuagaguucaaguuuuaucacauaucagcaaaguuuuagccuucccuuaaaaacagacaccuucaaagugaaaucuugccagaaggguugauuuuuaauuauguguauauacaaacuucucuauuuuaacauucaacauauucaggauuaauucuagaaagaugcuauagcugauuuauaaaacaaaaugauuuaggaucagaaagaaaauaggggcacacaauuucauguagucucucccuaacuacccccaaccauagcaucacaagguuuuuuuuuuuccuaaugccacaauugaaaccuguauuaacuuaaaaguugacacuaaaggcaggaauuaagaagucauuuuuuauggcuuuuaagcacuugaaugcuuuagaacccccuugaaaaugcuagugaacaggucuuauuccuuuaaauguugcuuugauuugaaucuuggugaaaucuagauucccuauuaaauagcugcaugcuaauuuuggagaaaguacaauuuaaaaccuuuaacaacuacucuauugacucugaagaaggggacuuuagcaugucgcuguuugggcuagagaagcauuucaacaccuuucugcaaacuaagauaaaaaacaaugaaugagagcuacaaauagaaaucuaguaaggcaguucuaucauguaggaaaaugguuucccaaauguuuucuacacugacauuuuuuaaaaaagauaugauacccgguucuuccacauucaguguauaaaacucaacuuuagacauguaugugcggagaagacucguauguccaaaaccauccauuugcauggcaaucuugucuuugcauugcuuugugucauucuggcuucccucacccacaggccacuggagggcugggaggcccaggagcucagcacucuaacuccuccaugacuuccaugacaaucguccgugggcccgucagaaucagauugcucacgguccgguagucuacaugcaggacauugagcccguugacagagacgacaaacugacagaccuucauuccugcugcggcugcagggccacuggggucuacagccuggauguggcauggcuuacuuccucgcaccacaaaaccccagccaaccgcgucaccaacaaucgugaaugucuuccuugcauacggagccccgggaguaaggaguuccucagaggugacaggucucuucagcacggacuugggguugcagagcacaggggggcugcugcugaggguggggcugcugcugaaguagccgcugcugccacagcugcucaugcugcuucuccucacugcagacacgaucuugaucuccuugcuggggcucacugacauaaagcugguagauuuccgauugucauggcucugcuuccucaggcagaagggacugucaugaguuuccugggaggagggggacuuuucauugagcagcuccaucagucuucgccuccgccggaaguucauucugaacugguagagaagauugcuguccacaaaugggugcuuguuggacacuauggcaaacaguucuacaccagacucacgaagauuucuagaugguggaauaaugucaucuugggauuuuccaucugugauuaaaaugccaauuuuggauacuccaguccuugauccugcuucugguuugaagcuauuuucaaaaauguaguucaaagcaagaccuguuaguguauuuccuccuuuauaugggagguuucggacagcuucaaucacuucaucuuuugugcuaaaugcauucaagugccauucuauucuggggucaccacuauacugugcaagaccaauucgugucuucucugagcccacaucgaaugcuguaaccagguuuuccaagaaaugccgaaccagucugaaguugaaucuuccaauacuccaugaaccaucgaccaggauuacaaugucagcaauugcuggaguuugacagacaaauuucacuucuucuggugaagauggucuacucccauuuccucuguccacaacuuugacucugggcuuuggauccuuucuuuuuucuaaaucuuuaauucugaauuggccuugagcuggcuugcuuucuuuaucuuuauuguaugcaauaauuugaacuguguaauucuggucuggcauaaggccuugaauaauugcuuuaguugcaguguucugcagauucagcugguuaguuuuuccaccugaaguuggagucacaagaaguuuguaaccaccaaauuucccucuuggagccuuccaugaaaucuguauacugucaugagauauuacauuauaucuuaaccuuguggguggagccacuugaccuuggacaauggugcagaaauaaacaauugccaaaaaagguggaagcaaccaguaccgcaucuugcgcuggaaaaucuucauuuuauuuuccgcuuuuuacaugggguguagcagccaccugugcugggcaagguuccagcccagguugggagcucuccgcgccuaggcaagaucgaagcuccgccgcuaguugguccuuggcggcgcaccgcccuugcucucuucccucggaguauccuuuuuuaauuagccucucucucuuucucucucccucuccuucugccgcugcgcuuccacuuccagcccccuggagcugccuccgccucuccagcugggagcccaggau

SEQ ID NO: 2272 - RNA, 2541 nt, Homo sapiens
ugugguacaauucucauauuuuauuuuguuaaugcaugauaaaaaauuaacgucaucauucagauccauuauuuggaaugaagaauuuaguauuuccugacugccuaauuuggcacuuugaggaauuuccucugcacgcugagccccaaaaugcacuauuuucuagaccaaaaaugaaaacgugcguauauacaagugagcugaaaaguuacaacacaagaugaucauuuuggugaaaaauaauccccccaaauaagcagcaugucauguccuuagaauauguuacacuagaaagcuaguaaaaauucaggcuaaggaggcaauuuagaguucaaguuuuaucacauaucagcaaaguuuuagccuucccuuaaaaacagacaccuucaaagugaaaucuugccagaaggguugauuuuuaauuauguguauauacaaacuucucuauuuuaacauucaacauauucaggauuaauucuagaaagaugcuauagcugauuuauaaaacaaaaugauuuaggaucagaaagaaaauaggggcacacaauuucauguagucucucccuaacuacccccaaccauagcaucacaagguuuuuuuuuuuccuaaugccacaauugaaaccuguauuaacuuaaaaguugacacuaaaggcaggaauuaagaagucauuuuuuauggcuuuuaagcacuugaaugcuuuagaacccccuugaaaaugcuagugaacaggucuuauuccuuuaaauguugcuuugauuugaaucuuggugaaaucuagauucccuauuaaauagcugcaugcuaauuuuggagaaaguacaauuuaaaaccuuuaacaacuacucuauugacucugaagaaggggacuuuagcaugucgcuguuugggcuagagaagcauuucaacaccuuucugcaaacuaagauaaaaaacaaugaaugagagcuacaaauagaaaucuaguaaggcaguucuaucauguaggaaaaugguuucccaaauguuuucuacacugacauuuuuuaaaaaagauaugauacccgguucuuccacauucaguguauaaaacucaacuuuagacauguaugugcggagaagacucguauguccaaaaccauccauuugcauggcaaucuugucuuugcauugcuuugugucauucuggcuucccucacccacaggccacuggagggcugggaggcccaggagcucagcacucuaacuccuccaugacuuccaugacaaucguccgugggcccgucagaaucagauugcucacgguccgguagucuacaugcaggacauugagcccguugacagagacgacaaacugacagaccuucauuccugcugcggcugcagggccacuggggucuacagccuggauguggcauggcuuacuuccucgcaccacaaaaccccagccaaccgcgucaccaacaaucgugaaugucuuccuugcauacggagccccgggaguaaggaguuccucagaggugacaggucucuucagcacggacuugggguugcagagcacaggggggcugcugcugaggguggggcugcugcugaaguagccgcugcugccacagcugcucaugcugcuucuccucacugcagacacgaucuugaucuccuugcuggggcucacugacauaaagcugguagauuuccgauugucauggcucugcuuccucaggcagaagggacugucaugaguuuccugggaggagggggacuuuucauugagcagcuccaucagucuucgccuccgccggaaguucauucugaacugguagagaagauugcuguccacaaaugggugcuuguuggacacuucuggugaagauggucuacucccauuuccucuguccacaacuuugacucugggcuuuggauccuuucuuuuuucuaaaucuuuaauucugaauuggccuugagcuggcuugcuuucuuuaucuuuauuguaugcaauaauuugaacuguguaauucuggucuggcauaaggccuugaauaauugcuuuaguugcaguguucugcagauucagcugguuaguuuuuccaccugaaguuggagucacaagaaguuuguaaccaccaaauuucccucuuggagccuuccaugaaaucuguauacugucaugagauauuacauuauaucuuaaccuuguggguggagccacuugaccuuggacaauggugcagaaauaaacaauugccaaaaaagguggaagcaaccaguaccgcaucuugcgcuggaaaaucuucauuuuauuuuccgcuuuuuacaugggguguagcagccaccugugcugggcaagguuccagcccagguugggagcucuccgcgccuaggcaagaucgaagcuccgccgcuaguugguccuuggcggcgcaccgcccuugcucucuucccucggaguauccuuuuuuaauuagccucucucucuuucucucucccucuccuucugccgcugcgcuuccacuuccagcccccuggagcugccuccgccucuccagcugggagcccaggau

SEQ ID NO: 2273 - RNA, 2359 nt, Homo sapiens
ugugguacaauucucauauuuuauuuuguuaaugcaugauaaaaaauuaacgucaucauucagauccauuauuuggaaugaagaauuuaguauuuccugacugccuaauuuggcacuuugaggaauuuccucugcacgcugagccccaaaaugcacuauuuucuagaccaaaaaugaaaacgugcguauauacaagugagcugaaaaguuacaacacaagaugaucauuuuggugaaaaauaauccccccaaauaagcagcaugucauguccuuagaauauguuacacuagaaagcuaguaaaaauucaggcuaaggaggcaauuuagaguucaaguuuuaucacauaucagcaaaguuuuagccuucccuuaaaaacagacaccuucaaagugaaaucuugccagaaggguugauuuuuaauuauguguauauacaaacuucucuauuuuaacauucaacauauucaggauuaauucuagaaagaugcuauagcugauuuauaaaacaaaaugauuuaggaucagaaagaaaauaggggcacacaauuucauguagucucucccuaacuacccccaaccauagcaucacaagguuuuuuuuuuuccuaaugccacaauugaaaccuguauuaacuuaaaaguugacacuaaaggcaggaauuaagaagucauuuuuuauggcuuuuaagcacuugaaugcuuuagaacccccuugaaaaugcuagugaacaggucuuauuccuuuaaauguugcuuugauuugaaucuuggugaaaucuagauucccuauuaaauagcugcaugcuaauuuuggagaaaguacaauuuaaaaccuuuaacaacuacucuauugacucugaagaaggggacuuuagcaugucgcuguuugggcuagagaagcauuucaacaccuuucugcaaacuaagauaaaaaacaaugaaugagagcuacaaauagaaaucuaguaaggcaguucuaucauguaggaaaaugguuucccaaauguuuucuacacugacauuuuuuaaaaaagauaugauacccgguucuuccacauucaguguauaaaacucaacuuuagacauguaugugcggagaagacucguauguccaaaaccauccauuugcauggcaaucuugucuuugcauugcuuugugucauucuggcuucccucacccacaggccacuggagggcugggaggcccaggagcucagcacucuaacuccuccaugacuuccaugacaaucguccgugggcccgucagaaucagauugcucacgguccgguagucuacaugcaggacauugagcccguugacagagacgacaaacugacagaccucauugauuucagucccaucugcauuguuauauacaauucgauaaccauugaucugucuugaaguugggucccagguuaaucgagcacuguuagagccaacauuggagauucucagguuucuugguggacuuaaagccaauguuguuucuugucccguaacaggaucacuggccucuucuccaaacauggcauaaacugugacuguguauucuguauugggcaacaacccacucaauucaauaucugugugggucucuccaauuuucaucucuuuuucauccccagccaggcccucuguuagaggagcauaaaggaucagguaaccugaggccccaggcacugcaucccauuugacucgcaugcuguucucagucacgucguacaguagaaggucagaagccaucgguaaagcaaguguaguuucaguuccccguaggccuucacuagcagugugggcauagauugcaaagacugcuaucugauauucaguuaaagacaucaaguuuuucaacacuguggaagauacaguuccaucuaccaccaccucgucugguuuuccaccccugguaggauaauacacaacucuguauuuuuccacauuuccuggggcaugaguccaguuaaccauaaagcuucuggcagugacuucagaaguaaucaacuccguaggcggcccagugauggcaugggcugaggcuuuaauuucucuguccuguucuuccacucuagagcagagaguccuggucagacucuccacaacugugugcaucagaucgaauucggcaacauuguacacaugagugcugucugguucagaggcgaucuccugcagcucauucacauccgcguuuuucaccccaauucgugucuucucugagcccacaucgaaugcuguaaccagguuuuccaagaaaugccgaaccagucugaaguugaaucuuccaauacuccaugaaccaucgaccaggauuacaaugucagcaauugcuggaguuugacagacaaauuucacuu

SEQ ID NO: 2274 - RNA, 3256 nt, Homo sapiens
ugugguacaauucucauauuuuauuuuguuaaugcaugauaaaaaauuaacgucaucauucagauccauuauuuggaaugaagaauuuaguauuuccugacugccuaauuuggcacuuugaggaauuuccucugcacgcugagccccaaaaugcacuauuuucuagaccaaaaaugaaaacgugcguauauacaagugagcugaaaaguuacaacacaagaugaucauuuuggugaaaaauaauccccccaaauaagcagcaugucauguccuuagaauauguuacacuagaaagcuaguaaaaauucaggcuaaggaggcaauuuagaguucaaguuuuaucacauaucagcaaaguuuuagccuucccuuaaaaacagacaccuucaaagugaaaucuugccagaaggguugauuuuuaauuauguguauauacaaacuucucuauuuuaacauucaacauauucaggauuaauucuagaaagaugcuauagcugauuuauaaaacaaaaugauuuaggaucagaaagaaaauaggggcacacaauuucauguagucucucccuaacuacccccaaccauagcaucacaagguuuuuuuuuuuccuaaugccacaauugaaaccuguauuaacuuaaaaguugacacuaaaggcaggaauuaagaagucauuuuuuauggcuuuuaagcacuugaaugcuuuagaacccccuugaaaaugcuagugaacaggucuuauuccuuuaaauguugcuuugauuugaaucuuggugaaaucuagauucccuauuaaauagcugcaugcuaauuuuggagaaaguacaauuuaaaaccuuuaacaacuacucuauugacucugaagaaggggacuuuagcaugucgcuguuugggcuagagaagcauuucaacaccuuucugcaaacuaagauaaaaaacaaugaaugagagcuacaaauagaaaucuaguaaggcaguucuaucauguaggaaaaugguuucccaaauguuuucuacacugacauuuuuuaaaaaagauaugauacccgguucuuccacauucaguguauaaaacucaacuuuagacauguaugugcggagaagacucguauguccaaaaccauccauuugcauggcaaucuugucuuugcauugcuuugugucauucuggcuucccucacccacaggccacuggagggcugggaggcccaggagcucagcacucuaacuccuccaugacuuccaugacaaucguccgugggcccgucagaaucagauugcucacgguccgguagucuacaugcaggacauugagcccguugacagagacgacaaacugacagaccguuccuaugacuucuuccucaggguccccuugagcugucauguaggucacccuaaacugcugcacaucgcugucagaaaugucccauuuuacccgcaggcuagaaguaguuucaucaccuacaacuagguuucugauucccgucuggaaaacugaagucacagaugugguaggcacuaugguuguagcugguucuguccaaaaacugucaaguguggucccgacagcagucaccaccucacucucgcuuccaucaucaaguacggccaauagugaaacuucauacuccguaccgggcuccaggccuucaauaacaugugaguccugcucuucuuucaggacaaccuccucagucuuccccccauagacuggaauccacaucaauuuguguagcccuucaucagcugagaggggaugccaggucacccuaaaacugucugucgucaccucaucaauuucuaaguauugcugggcuggaacuuccucggugguaaaaacuccagucagaggcucugacuguccuucaucauagauggagaaaauagcaauaguauacucugugagaggugucaagcccuucagagggaagguaguaauaggaucgacuucaaccucauugauuucagucccaucugcauuguuauauacaauucgauaaccauugaucugucuugaaguugggucccagguuaaucgagcacuguuagagccaacauuggagauucucagguuucuugguggacuuaaagccaauguuguuucuugucccguaacaggaucacuggccucuucuccaaacauggcauaaacugugacuguguauucuguauugggcaacaacccacucaauucaauaucugugugggucucuccaauuuucaucucuuuuucauccccagccaggcccucuguuagaggagcauaaaggaucagguaaccugaggccccaggcacugcaucccauuugacucgcaugcuguucucagucacgucguacaguagaaggucagaagccaucgguaaagcaaguguaguuucaguuccccguaggccuucacuagcagugugggcauagauugcaaagacugcuaucugauauucaguuaaagacaucaaguuuuucaacacuguggaagauacaguuccaucuaccaccaccucgucugguuuuccaccccugguaggauaauacacaacucuguauuuuuccacauuuccuggggcaugaguccaguuaaccauaaagcuucuggcagugacuucagaaguaaucaacuccguaggcggcccagugauggcaugggcugaggcuuuaauuucucuguccuguucuuccacucuagagcagagaguccuggucagacucuccacaacugugugcaucagaucgaauucggcaacauuguacacaugagugcugucugguucagaggcgaucuccugcagcucauucacauccgcguuuuucaccccuauggcaaacaguucuacaccagacucacgaagauuucuagaugguggaauaaugucaucuugggauuuuccaucugugauuaaaaugccaauuuuggauacuccaguccuugauccugcuucugguuugaagcuauuuucaaaaauguaguucaaagcaagaccuguuaguguauuuccuccuuuauaugggagguuucggacagcuucaaucacuucaucuuuugugcuaaaugcauucaagugccauucuauucuggggucaccacuauacugugcaagaccaauucgugucuucucugagcccacaucgaaugcuguaaccagguuuuccaagaaaugccgaaccagucugaaguugaaucuuccaauacuccaugaaccaucgaccaggauuacaaugucagcaauugcuggaguuugacagacaaauuucacuu

SEQ ID NO: 2275 - RNA, 3957 nt, Homo sapiens
ugugguacaauucucauauuuuauuuuguuaaugcaugauaaaaaauuaacgucaucauucagauccauuauuuggaaugaagaauuuaguauuuccugacugccuaauuuggcacuuugaggaauuuccucugcacgcugagccccaaaaugcacuauuuucuagaccaaaaaugaaaacgugcguauauacaagugagcugaaaaguuacaacacaagaugaucauuuuggugaaaaauaauccccccaaauaagcagcaugucauguccuuagaauauguuacacuagaaagcuaguaaaaauucaggcuaaggaggcaauuuagaguucaaguuuuaucacauaucagcaaaguuuuagccuucccuuaaaaacagacaccuucaaagugaaaucuugccagaaggguugauuuuuaauuauguguauauacaaacuucucuauuuuaacauucaacauauucaggauuaauucuagaaagaugcuauagcugauuuauaaaacaaaaugauuuaggaucagaaagaaaauaggggcacacaauuucauguagucucucccuaacuacccccaaccauagcaucacaagguuuuuuuuuuuccuaaugccacaauugaaaccuguauuaacuuaaaaguugacacuaaaggcaggaauuaagaagucauuuuuuauggcuuuuaagcacuugaaugcuuuagaacccccuugaaaaugcuagugaacaggucuuauuccuuuaaauguugcuuugauuugaaucuuggugaaaucuagauucccuauuaaauagcugcaugcuaauuuuggagaaaguacaauuuaaaaccuuuaacaacuacucuauugacucugaagaaggggacuuuagcaugucgcuguuugggcuagagaagcauuucaacaccuuucugcaaacuaagauaaaaaacaaugaaugagagcuacaaauagaaaucuaguaaggcaguucuaucauguaggaaaaugguuucccaaauguuuucuacacugacauuuuuuaaaaaagauaugauacccgguucuuccacauucaguguauaaaacucaacuuuagacauguaugugcggagaagacucguauguccaaaaccauccauuugcauggcaaucuugucuuugcauugcuuugugucauucuggcuucccucacccacaggccacuggagggcugggaggcccaggagcucagcacucuaacuccuccaugacuuccaugacaaucguccgugggcccgucagaaucagauugcucacgguccgguagucuacaugcaggacauugagcccguugacagagacgacaaacugacagaccguuccuaugacuucuuccucaggguccccuugagcugucauguaggucacccuaaacugcugcacaucgcugucagaaaugucccauuuuacccgcaggcuagaaguaguuucaucaccuacaacuagguuucugauucccgucuggaaaacugaagucacagaugugguaggcacuaugguuguagcugguucuguccaaaaacugucaaguguggucccgacagcagucaccaccucacucucgcuuccaucaucaaguacggccaauagugaaacuucauacuccguaccgggcuccaggccuucaauaacaugugaguccugcucuucuuucaggacaaccuccucagucuuccccccauagacuggaauccacaucaauuuguguagcccuucaucagcugagaggggaugccaggucacccuaaaacugucugucgucaccucaucaauuucuaaguauugcugggcuggaacuuccucggugguaaaaacuccagucagaggcucugacuguccuucaucauagauggagaaaauagcaauaguauacucugugagaggugucaagcccuucagagggaagguaguaauaggaucgacuucaaccucauugauuucagucccaucugcauuguuauauacaauucgauaaccauugaucugucuugaaguugggucccagguuaaucgagcacuguuagagccaacauuggagauucucagguuucuugguggacuuaaagccaauguuguuucuugucccguaacaggaucacuggccucuucuccaaacauggcauaaacugugacuguguauucuguauugggcaacaacccacucaauucaauaucugugugggucucuccaauuuucaucucuuuuucauccccagccaggcccucuguuagaggagcauaaaggaucagguaaccugaggccccaggcacugcaucccauuugacucgcaugcuguucucagucacgucguacaguagaaggucagaagccaucgguaaagcaaguguaguuucaguuccccguaggccuucacuagcagugugggcauagauugcaaagacugcuaucugauauucaguuaaagacaucaaguuuuucaacacuguggaagauacaguuccaucuaccaccaccucgucugguuuuccaccccugguaggauaauacacaacucuguauuuuuccacauuuccuggggcaugaguccaguuaaccauaaagcuucuggcagugacuucagaaguaaucaacuccguaggcggcccagugauggcaugggcugaggcuuuaauuucucuguccuguucuuccacucuagagcagagaguccuggucagacucuccacaacugugugcaucagaucgaauucggcaacauuguacacaugagugcugucugguucagaggcgaucuccugcagcucauucacauccgcguuuuucaccccuauggcaaacaguucuacaccagacucacgaagauuucuagaugguggaauaaugucaucuugggauuuuccaucugugauuaaaaugccaauuuuggauacuccaguccuugauccugcuucugguuugaagcuauuuucaaaaauguaguucaaagcaagaccuguuaguguauuuccuccuuuauaugggagguuucggacagcuucaaucacuucaucuuuugugcuaaaugcauucaagugccauucuauucuggggucaccacuauacugugcaagaccaauucgugucuucucugagcccacaucgaaugcuguaaccagguuuuccaagaaaugccgaaccagucugaaguugaaucuuccaauacuccaugaaccaucgaccaggauuacaaugucagcaauugcuggaguuugacagacaaauuucacuucuucuggugaagauggucuacucccauuuccucuguccacaacuuugacucugggcuuuggauccuuucuuuuuucuaaaucuuuaauucugaauuggccuugagcuggcuugcuuucuuuaucuuuauuguaugcaauaauuugaacuguguaauucuggucuggcauaaggccuugaauaauugcuuuaguugcaguguucugcagauucagcugguuaguuuuuccaccugaaguuggagucacaagaaguuuguaaccaccaaauuucccucuuggagccuuccaugaaaucuguauacugucaugagauauuacauuauaucuuaaccuuguggguggagccacuugaccuuggacaauggugcagaaauaaacaauugccaaaaaagguggaagcaaccaguaccgcaucuugcgcuggaaaaucuucauuuuauuuuccgcuuuuuacaugggguguagcagccaccugugcugggcaagguuccagcccagguugggagcucuccgcgccuaggcaagaucgaagcuccgccgcuaguugguccuuggcggcgcaccgcccuugcucucuucccucggaguauccuuuuuuaauuagccucucucucuuucucucucccucuccuucugccgcugcgcuuccacuuccagcccccuggagcugccuccgccucuccagcugggagcccaggau

SEQ ID NO: 2276 - RNA, 2058 nt, Homo sapiens
uagauucaacaguuuuauugaaugucaaagcacauuauuccgcacagcugcuagagaggcacugcugaacccaugcuucucuuccaugacaaacaccuaguaagcagucagcauaaacucuucccuuacaaccucugacaucacccccagggcaggcacacacagaacagcaauugcugaauugcauaugaaaauuauaguuuauugucuauacaacugaagguuuaacucggacuccugcuucugucggagcuguauaaagaagcaauucuucucuuagaacaaauaagcacaguacacuauuguaaucuaagaaacagacacuauuuauguauuggaaagccuugcucucaauagggcuaacaguccaauggcccauaagccacuauuuuagcagcuguagaaaagaaagcuguggaagucacaaggaaugagaugcuaaaagcaacagagacagaugaucccaacaccaacgggagguuucaagucccagcugcugccacuguuaguuuagcaagcaagacucguagguugggaccacguacuuaauguugauaaaggcauuuucuccuccguagcgcucgaaggccuccagugucuccuggaucaaguccccaauguucucccucuucugcuggcuguagucaaugccgucuccggaguucacuauaaucucagcuacuugagaggcugaggugggaggaucacuugagcccagguggucgagguugcaacgagccaugaucgcgccacugcacuccagccugggcaaagaguaagacccauucauauucuuaaagauguucaggacagggaggauuugacgguaauaaggcaccaaggccuugcccaccaucucagcugacacaaccagaugcuggaggaccuugagagugacacagaugaccugucgguuucggagguucaaggcauuuuuuaucgggauaaugagcuguggaaggacagguaggaucuuguucccaccguguuccagcaugucguggauuccuugccgagcaaaaaacucauagggaaaugucauuucacaaagcccaucaaaaaacagaggcagauaaugaugguaauccagcuucucaauuucuaccuuuuuuuuaucccucauugagccuuugccucggaccaugauuuuacauccgguuucugcuucaaguuguuuggcuguaaguccucuagguccaaggauucucccaacaaaauuaaaaucuggguauucuuuuacaggcacauaaaguuucucuuguaacugaacaauaggucccacagcaucaggcaauucugcacuccuuuucucuguacugccauuuaaugugucauuguacaugucuuuccguacucugcuaauuucuucguccagcagccgcucgaggugguugaagaucccgcagaaguugggcaggcugcucaugagcuucuugucguucaucagcugcaucagguaaucuggggugggcuucggcuucuccuucguuuccauuuccccgaccauauuccaggcuccgcagcucacuccgcccgccgccgccgccgccgccgccggagaggagggaggggcgggggcgagccccggccgcgggccgcucgggacccggcgucccgcuccgcgccggcucccgcucuggcucccgcgccgagccccggggcggccggcaccgcgcgcucgcccgccccccgcaggcacuuuccgcccgggcccgacgcgcucccagccgccgccgcucucggccgcccggcucggcgcgucccucacgaggccggcgggcgggcgggaggcgggucucggcuggccgagugcgggcgcggggcgcgggcugcuggcgccggacgaggaggagccggggccgccgcucgcucggcuggucgagcccgcucagcgccgccgccgccugugccgcgggcucggggggucucucugggcugguccccgccgcggcgccucugccgcugccgccgcgcuccgacugcgcuccuccucuuccuccuccuccuucuccuccuccuccuccucacucacuuggcggcggaguucgccucaguuca

SEQ ID NO: 2277 - RNA, 1359 nt, Homo sapiens
uagauucaacaguuuuauugaaugucaaagcacauuauuccgcacagcugcuagagaggcacugcugaacccaugcuucucuuccaugacaaacaccuaguaagcagucagcauaaacucuucccuuacaaccucugacaucacccccagggcaggcacacacagaacagcaauugcugaauugcauaugaaaauuauaguuuauugucuauacaacugaagguuuaacucggacuccugcuucugucggagcuguauaaagaagcaauucuucucuuagaacaaauaagcacaguacacuauuguaaucuaagaaacagacacuauuuauguauuggaaagccuugcucucaauagggcuaacaguccaauggcccauaagccacuauuuuagcagcuguagaaaagaaagcuguggaagucacaaggaaugagaugcuaaaagcaacagagacagaugaucccaacaccaacgggagguuucaagucccagcugcugccacuguuaguuuagcaagcaagacucguagguugggaccacguacuuaauguugauaaaggcauuuucuccuccguagcgcucgaaggccuccagugucuccuggaucaaguccccaauguucucccucuucugcuggcuguagucaaugccgucuccggaguucacuucguccagcagccgcucgaggugguugaagaucccgcagaaguugggcaggcugcucaugagcuucuugucguucaucagcugcaucagguaaucuggggugggcuucggcuucuccuucguuuccauuuccccgaccauauuccaggcuccgcagcucacuccgcccgccgccgccgccgccgccgccggagaggagggaggggcgggggcgagccccggccgcgggccgcucgggacccggcgucccgcuccgcgccggcucccgcucuggcucccgcgccgagccccggggcggccggcaccgcgcgcucgcccgccccccgcaggcacuuuccgcccgggcccgacgcgcucccagccgccgccgcucucggccgcccggcucggcgcgucccucacgaggccggcgggcgggcgggaggcgggucucggcuggccgagugcgggcgcggggcgcgggcugcuggcgccggacgaggaggagccggggccgccgcucgcucggcuggucgagcccgcucagcgccgccgccgccugugccgcgggcucggggggucucucugggcugguccccgccgcggcgccucugccgcugccgccgcgcuccgacugcgcuccuccucuuccuccuccuccuucuccuccuccuccuccucacucacuuggcggcggaguucgccucaguuca

SEQ ID NO: 2278 - RNA, 1941 nt, Homo sapiens
uagauucaacaguuuuauugaaugucaaagcacauuauuccgcacagcugcuagagaggcacugcugaacccaugcuucucuuccaugacaaacaccuaguaagcagucagcauaaacucuucccuuacaaccucugacaucacccccagggcaggcacacacagaacagcaauugcugaauugcauaugaaaauuauaguuuauugucuauacaacugaagguuuaacucggacuccugcuucugucggagcuguauaaagaagcaauucuucucuuagaacaaauaagcacaguacacuauuguaaucuaagaaacagacacuauuuauguauuggaaagccuugcucucaauagggcuaacaguccaauggcccauaagccacuauuuuagcagcuguagaaaagaaagcuguggaagucacaaggaaugagaugcuaaaagcaacagagacagaugaucccaacaccaacgggagguuucaagucccagcugcugccacuguuaguuuagcaagcaagacucguagguugggaccacguacuuaauguugauaaaggcauuuucuccuccguagcgcucgaaggccuccagugucuccuggaucaaguccccaauguucucccucuucugcuggcuguagucaaugccgucuccggaguucacauucauauucuuaaagauguucaggacagggaggauuugacgguaauaaggcaccaaggccuugcccaccaucucagcugacacaaccagaugcuggaggaccuugagagugacacagaugaccugucgguuucggagguucaaggcauuuuuuaucgggauaaugagcuguggaaggacagguaggaucuuguucccaccguguuccagcaugucguggauuccuugccgagcaaaaaacucauagggaaaugucauuucacaaagcccaucaaaaaacagaggcagauaaugaugguaauccagcuucucaauuucuaccuuuuuuuuaucccucauugagccuuugccucggaccaugauuuuacauccgguuucugcuucaaguuguuuggcuguaaguccucuagguccaaggauucucccaacaaaauuaaaaucuggguauucuuuuacaggcacauaaaguuucucuuguaacugaacaauaggucccacagcaucaggcaauucugcacuccuuuucucuguacugccauuuaaugugucauuguacaugucuuuccguacucugcuaauuucuucguccagcagccgcucgaggugguugaagaucccgcagaaguugggcaggcugcucaugagcuucuugucguucaucagcugcaucagguaaucuggggugggcuucggcuucuccuucguuuccauuuccccgaccauauuccaggcuccgcagcucacuccgcccgccgccgccgccgccgccgccggagaggagggaggggcgggggcgagccccggccgcgggccgcucgggacccggcgucccgcuccgcgccggcucccgcucuggcucccgcgccgagccccggggcggccggcaccgcgcgcucgcccgccccccgcaggcacuuuccgcccgggcccgacgcgcucccagccgccgccgcucucggccgcccggcucggcgcgucccucacgaggccggcgggcgggcgggaggcgggucucggcuggccgagugcgggcgcggggcgcgggcugcuggcgccggacgaggaggagccggggccgccgcucgcucggcuggucgagcccgcucagcgccgccgccgccugugccgcgggcucggggggucucucugggcugguccccgccgcggcgccucugccgcugccgccgcgcuccgacugcgcuccuccucuuccuccuccuccuucuccuccuccuccuccucacucacuuggcggcggaguucgccucaguuca

SEQ ID NO: 2279 - RNA, 1824 nt, Homo sapiens
uagauucaacaguuuuauugaaugucaaagcacauuauuccgcacagcugcuagagaggcacugcugaacccaugcuucucuuccaugacaaacaccuaguaagcagucagcauaaacucuucccuuacaaccucugacaucacccccagggcaggcacacacagaacagcaauugcugaauugcauaugaaaauuauaguuuauugucuauacaacugaagguuuaacucggacuccugcuucugucggagcuguauaaagaagcaauucuucucuuagaacaaauaagcacaguacacuauuguaaucuaagaaacagacacuauuuauguauuggaaagccuugcucucaauagggcuaacaguccaauggcccauaagccacuauuuuagcagcuguagaaaagaaagcuguggaagucacaaggaaugagaugcuaaaagcaacagagacagaugaucccaacaccaacgggagguuucaagucccagcugcugccacuguuaguuuagcaagcaagacucguagguugggaccacguacuuaauguugauaaaggcauuuucuccuccguagcgcucgaaggccuccagugucuccuggaucaaguccccaauguucucccucuucugcuggcuguagucaaugccgucuccggaguucacauucauauucuuaaagauguucaggacagggaggauuugacgguaauaaggcaccaaggccuugcccaccaucucagcugacacaaccagaugcuggaggaccuugagagugacacagaugaccugucgguuucggagguucaaggcauuuuuuaucgggauaaugagcuguggaaggacagguaggaucuuguucccaccguguuccagcaugucguggauuccuugccgagcaaaaaacucauagggaaaugucauuucacaaagcccaucaaaaaacagaggcagauaaugaugguaauccagcuucucaauuucuacaucuggguauucuuuuacaggcacauaaaguuucucuuguaacugaacaauaggucccacagcaucaggcaauucugcacuccuuuucucuguacugccauuuaaugugucauuguacaugucuuuccguacucugcuaauuucuucguccagcagccgcucgaggugguugaagaucccgcagaaguugggcaggcugcucaugagcuucuugucguucaucagcugcaucagguaaucuggggugggcuucggcuucuccuucguuuccauuuccccgaccauauuccaggcuccgcagcucacuccgcccgccgccgccgccgccgccgccggagaggagggaggggcgggggcgagccccggccgcgggccgcucgggacccggcgucccgcuccgcgccggcucccgcucuggcucccgcgccgagccccggggcggccggcaccgcgcgcucgcccgccccccgcaggcacuuuccgcccgggcccgacgcgcucccagccgccgccgcucucggccgcccggcucggcgcgucccucacgaggccggcgggcgggcgggaggcgggucucggcuggccgagugcgggcgcggggcgcgggcugcuggcgccggacgaggaggagccggggccgccgcucgcucggcuggucgagcccgcucagcgccgccgccgccugugccgcgggcucggggggucucucugggcugguccccgccgcggcgccucugccgcugccgccgcgcuccgacugcgcuccuccucuuccuccuccuccuucuccuccuccuccuccucacucacuuggcggcggaguucgccucaguuca

SEQ ID NO: 2280 - RNA, 2092 nt, Homo sapiens
uuaauaaaaacagauuuuaauaaauuucaauuaauuauaccaugaucauaaauuaucuuuauuaaagaauacauauucuugugauuuaaaaccaaauauuuuaagugauauaucuaauagaaauugacaugaaauuauuucauuuaaaaguuacaauaaaaggcaaauagacauccguauuugucucauuuuagaaaacauaggcuuuaagaaucaaaaguaagcuuccaagcucacggccaggauuacaacuucauauuacagaaauguuuaauaacaaauauuugacuaacagauuauaauucugaaguuguacauuuuuaaaagccuuuuaauuuugcuucuuuacuaaaaaaacuaugaacugaugaacucacaauagaaaauuaauaauaauuucagggaaaaaaaaaaaaggcacauccaggcaccacauucaaggugaucgguaaaacgcagugucccgggucuacugcacauaaucaacagacugcaaauaaacuacuccggaaaauucuaaaauaggacaagaauauucuguaaaagccgggauaacacgacugcacugacgcucugcuagagggcuguucuguugccaaggugcgagcuucccagaaggagcagcugcuggccaucuaagcgcucacuccccacagacgcuucccuuccacgguccaucaucuccgagccaucagaggcuggaccgucucuccggucugggcacacaccucgugauugcagcucuccacagcaccggggcgagcaagaggcugagcguggucacacucaguauaaggagguacaccucccgagagaugacgcccgcucuucgcgcccggcuccccaggacaaaggaaaacucgcugaccugggcaagccccgcagagacgauccacuugauguacuggcugcuccucggcagaaugagagacaggaccagcgccgccaggagaaacuucaucaccaccacugacaaggugaggaacaccagcaccgugagcucguacgccacaaacguggggaacacguggagcccuauggaggcgaagaaaacgauggccaggaagucgcggauggguucgauggagguggcgaucuccucggugaccacggggcccugagaggagacgagcgcuccagccaggaaacagcccagcuccauggagacguccagcagcuccgugaccguuaacauuaagaagauaaaggcagauauucccaagaucaggauuucuuuguuccccuugcuuuccaugugcagcuuccgauaauaggguccaaugagauacuucuuuauaacaagacauaaaagaaaaaccgccgcuagugaaaaaagaaucugaccaaucaaaaccaggauucggagaacuuccacgacaaugcuagaagaugcacuggcgcccgccuguaugagagucggcaugacggccaugaagagcccgagcugcacguccugcgucaccagcaugccgaggagcacggugcuguagucaaugucgccuucuuugucaccccgagcacugcccaugaggaaccuggacacgaggggugugcuugacaaggacagacacguggaaaugaagacgcucugcguggguuugauccgcaagagaugcccccacagcaagccaaaugcaaucauuaacagugucauguaacacggcccuuguaaggaaaucuuccacaccacuugcugggcaauguugacauuggacuguccaaagguuuuuggcaagagcugcuucccgagcggguugacgguggaggggugaacggccacgagggacaccacgccuuucccgggacuaagguucuggucuaugaagaccuugaguucuccguuggcuucaauuagaccggcaucuuuugccauguuaccagauccgggaaaucaaugcuacaaauguucaccuucccagagaagaaaaaugauuuuucugggcacagccccggggucccggcgcaacgugcaggcucgcggcguccaccccagaccccggcggcgcccgcccggcugaccgguaacucugacaggugggcuuccgggguccgcgccgcgcgccugucacuaggccucgggccgccuccgcac

SEQ ID NO: 2281 - RNA, 1186 nt, Homo sapiens
uuaauaaaaacagauuuuaauaaauuucaauuaauuauaccaugaucauaaauuaucuuuauuaaagaauacauauucuugugauuuaaaaccaaauauuuuaagugauauaucuaauagaaauugacaugaaauuauuucauuuaaaaguuacaauaaaaggcaaauagacauccguauuugucucauuuuagaaaacauaggcuuuaagaaucaaaaguaagcuuccaagcucacggccaggauuacaacuucauauuacagaaauguuuaauaacaaauauuugacuaacagauuauaauucugaaguuguacauuuuuaaaagccuuuuaauuuugcuucuuuacuaaaaaaacuaugaacugaugaacucacaauagaaaauuaauaauaauuucagggaaaaaaaaaaaaggcacauccaggcaccacauucaaggugaucgguaaaacgcagugucccgggucuacugcacauaaucaacagacugcaaauaaacuacuccggaaaauucuaaaauaggacaagaauauucuguaaaagccgggauaacacgacugcacugacgcucugcuagagggcuguucuguugccaaggugcgagcuucccagaaggagcagcugcuggccaucuaagcgcucacuccccacagacgcuucccuuccacgguccaucaucuccgagccaucagaggcuggaccgucucuccggucugggcacacaccucgugauugcagcucuccacagcaccggggcgagcaagaggcugagcguggucacacucaguauaaggagguacaccucccgagagaugacgcccgcucuucgcgcccggcuccccaggacaaaggaaaacucgcugaccugggcaagccccgcagagacgauccacuugauguacuggcugcuccucggcagaaugagagacaggaccagcgccgccaggagaaaaucuuuugccauguuaccagauccgggaaaucaaugcuacaaauguucaccuucccagagaagaaaaaugauuuuucugggcacagccccggggucccggcgcaacgugcaggcucgcggcguccaccccagaccccggcggcgcccgcccggcugaccgguaacucugacaggugggcuuccgggguccgcgccgcgcgccugucacuaggccucgggccgccuccgcac

SEQ ID NO: 2282 - RNA, 2924 nt, Homo sapiens
uuaauaaaaacagauuuuaauaaauuucaauuaauuauaccaugaucauaaauuaucuuuauuaaagaauacauauucuugugauuuaaaaccaaauauuuuaagugauauaucuaauagaaauugacaugaaauuauuucauuuaaaaguuacaauaaaaggcaaauagacauccguauuugucucauuuuagaaaacauaggcuuuaagaaucaaaaguaagcuuccaagcucacggccaggauuacaacuucauauuacagaaauguuuaauaacaaauauuugacuaacagauuauaauucugaaguuguacauuuuuaaaagccuuuuaauuuugcuucuuuacuaaaaaaacuaugaacugaugaacucacaauagaaaauuaauaauaauuucagggaaaaaaaaaaaaggcacauccaggcaccacauucaaggugaucgguaaaacgcagugucccgggucuacugcacauaaucaacagacugcaaauaaacuacuccggaaaauucuaaaauaggacaagaauauucuguaaaagccgggauaacacgacugcacugacgcucugcuagagggcuguucuguugccaaggugcgagcuucccagaaggagcagcugcuggccaucuaagcgcucacuccccacagacgcuucccuuccacgguccaucaucuccgagccaucagaggcuggaccgucucuccggucugggcacacaccucgugauugcagcucuccacagcaccggggcgagcaagaggcugagcguggucacacucaguauaaggagguacaccucccgagagaugacgcccgcucuucgcgcccggcuccccaggacaaaggaaaacucgcugaccugggcaagccccgcagagacgauccacuugauguacuggcugcuccucggcagaaugagagacaggaccagcgccgccaggagaaacuucaucaccaccacugacaaggugaggaacaccagcaccgugagcucguacgccacaaacguggggaacacguggagcccuauggaggcgaagaaaacgauggccaggaagucgcggauggguucgauggagguggcgaucuccucggugaccacggggcccugagaggagacgagcgcuccagccaggaaacagcccagcuccauggagacguccagcagcuccgugaccguuaacauuaagaagauaaaggcagauauucccaagaucaggauuucuuuguuccccuugcuuuccaugugcagcuuccgauaauaggguccaaugagauacuucuuuauaacaagacauaaaagaaaaaccgccgcuagugaaaaaagaaucugaccaaucaaaaccaggauucggagaacuuccacgacaaugcuagaagaugcacuggcgcccgccuguaugagagucggcaugacggccaugaagagcccgagcugcacguccugcgucaccagcaugccgaggagcacggugcuguagucaaugucgccuucuuugucaccccgagcacugcccaugaggaaccuggacacgaggggugugcuugacaaggacagacacguggaaaugaagacgcucugcguggguuugauccgcaagagaugcccccacagcaagccaaaugcaaucauuaacagugucauguaacacggcccuuguaaggaaaucuuccacaccuuucuuagcuuuucuggagaaaauucuaagccaacaagaaaaagaguaaaaaacaccccaaauucuccuaaugucuccacuugcacaauagacuuaauacuauuuaguccugaaggucccagaaguacaccacaaauaauauaaccaaacauuguaggcaauccuauggcuguacauagccagccacaaggcaaggacagcauuccuaugguaacaauguccuuuauaaaguggugaucugcacgugggaugguugaaucucugggcuuggucaaaauauacugguuguucugggagucaaucagcaugcuaagacccaagucauccuccacuucucguuuuguuauauuuugcuuagaauuggccucuucuuccuccacccucagaacugccucaaaauugacccccuugacugauuuauugucgucaaaagcauguuccucuaucucuuccuccagacgauccgcugccuuucuuacaucuucaagaaucucgucaagcauggauaaacuuugguuuugauguugcauauuuuuaagggcuucaacuugauguuuuucugcugccagaaguuccauauauucuguuucuuccuuuauugcagccucucucagggccuccaggcgcugccggcugcucuccuucauguucacgacaucuuuguaaucccccugcagggcucucugcaguccguagacagcuuggaaaacggaauuuucacuuucauucagcucuuucuggaaaauuucaaacgugugcaccugaaacaguuucucuucauccgacaggcccacgucuuucuccacugcuccaauugcaguuuucaguuuguucagaacugcauucuucuggcggagaagcccugagagcuuccugcagcugucccggacccacugccggcucugcauggcagccaccccucgcccgcggugcaguuugaucacacgcugcgccaccuccucgugcuccacagccugcaccgcccagggaaggacgggaaacagcacccagaagaagcuucuucccaacaccuucaugauccagguccggagggcagggcacagcaauccacgggucucugccccacugagcuugcaugucagacacacauuuucagaucuuuugccauguuaccagauccgggaaaucaaugcuacaaauguucaccuucccagagaagaaaaaugauuuuuccuggccgagcgucgggccggcgugacgugcgcgcggcgcggu

SEQ ID NO: 2283 - RNA, 723 nt, Homo sapiens
uucaaauauuuuaaccauuauuaaaauggaaagguaaagaauggaucacaagauuucagugaaagagauuauguaucagauuacauaaauaacacauaguuugagaauuaccguuaacauuaagaagauaaaggcagauauucccaagaucaggauuucuuuguuccccuugcuuuccaugugcagcuuccgauaauaggguccaaugagauacuucuuuauaacaagacauaaaagaaaaaccgccgcuagugaaaaaagaaucugaccaaucaaaaccaggauucggagaacuuccacgacaaugcuagaagaugcacuggcgcccgccuguaugagagucggcaugacggccaugaagagcccgagcugcacguccugcgucaccagcaugccgaggagcacggugcuguagucaaugucgccuuucccgggacuaagguucuggucuaugaagaccuugaguucuccguuggcuucaauuagaccggcaucuuuugccauguuaccagauccgggaaaucaaugcuacaaauguucaccuucccagagaagaaaaaugauuuuucugggcacagccccggggucccggcgcaacgugcaggcucgcggcguccaccccagaccccggcggcgcccgcccggcugaccgguaacucugacaggugggcuuccgggguccgcgccgcgcgccugucacuaggccucgggccgccuccgcac

SEQ ID NO: 2284 - RNA, 1591 nt, Homo sapiens
uuaauaaaaacagauuuuaauaaauuucaauuaauuauaccaugaucauaaauuaucuuuauuaaagaauacauauucuugugauuuaaaaccaaauauuuuaagugauauaucuaauagaaauugacaugaaauuauuucauuuaaaaguuacaauaaaaggcaaauagacauccguauuugucucauuuuagaaaacauaggcuuuaagaaucaaaaguaagcuuccaagcucacggccaggauuacaacuucauauuacagaaauguuuaauaacaaauauuugacuaacagauuauaauucugaaguuguacauuuuuaaaagccuuuuaauuuugcuucuuuacuaaaaaaacuaugaacugaugaacucacaauagaaaauuaauaauaauuucagggaaaaaaaaaaaaggcacauccaggcaccacauucaaggugaucgguaaaacgcagugucccgggucuacugcacauaaucaacagacugcaaauaaacuacuccggaaaauucuaaaauaggacaagaauauucuguaaaagccgggauaacacgacugcacugacgcucugcuagagggcuguucuguugccaaggugcgagcuucccagaaggagcagcugcuggccaucuaagcgcucacuccccacagacgcuucccuuccacgguccaucaucuccgagccaucagaggcuggaccgucucuccggucugggcacacaccucgugauugcagcucuccacagcaccggggcgagcaagaggcugagcguggucacacucaguauaaggagguacaccucccgagagaugacgcccgcucuucgcgcccggcuccccaggacaaaggaaaacucgcugaccugggcaagccccgcagagacgauccacuugauguacuggcugcuccucggcagaaugagagacaggaccagcgccgccaggagaaacuucaucaccaccacugacaaggugaggaacaccagcaccgugagcucguacgccacaaacguggggaacacguggagcccuauggaggcgaagaaaacgauggccaggaagucgcggauggguucgauggagguggcgaucuccucggugaccacggggcccugagaggagacgagcgcuccagccaggaaacagcccagcuccauggagacguccagcagcuccgugaccacuugcugggcaauguugacauuggacuguccaaagguuuuuggcaagagcugcuucccgagcggguugacgguggaggggugaacggccacgagggacaccacgccuuucccgggacuaagguucuggucuaugaagaccuugaguucuccguuggcuucaauuagaccggcaucuuuugccauguuaccagauccgggaaaucaaugcuacaaauguucaccuucccagagaagaaaaaugauuuuucugggcacagccccggggucccggcgcaacgugcaggcucgcggcguccaccccagaccccggcggcgcccgcccggcugaccgguaacucugacaggugggcuuccgggguccgcgccgcgcgccugucacuaggccucgggccgccuccgcac

SEQ ID NO: 2285 - RNA, 1798 nt, Homo sapiens
uuaauaaaaacagauuuuaauaaauuucaauuaauuauaccaugaucauaaauuaucuuuauuaaagaauacauauucuugugauuuaaaaccaaauauuuuaagugauauaucuaauagaaauugacaugaaauuauuucauuuaaaaguuacaauaaaaggcaaauagacauccguauuugucucauuuuagaaaacauaggcuuuaagaaucaaaaguaagcuuccaagcucacggccaggauuacaacuucauauuacagaaauguuuaauaacaaauauuugacuaacagauuauaauucugaaguuguacauuuuuaaaagccuuuuaauuuugcuucuuuacuaaaaaaacuaugaacugaugaacucacaauagaaaauuaauaauaauuucagggaaaaaaaaaaaaggcacauccaggcaccacauucaaggugaucgguaaaacgcagugucccgggucuacugcacauaaucaacagacugcaaauaaacuacuccggaaaauucuaaaauaggacaagaauauucuguaaaagccgggauaacacgacugcacugacgcucugcuagagggcuguucuguugccaaggugcgagcuucccagaaggagcagcugcuggccaucuaagcgcucacuccccacagacgcuucccuuccacgguccaucaucuccgagccaucagaggcuggaccgucucuccggucugggcacacaccucgugauugcagcucuccacagcaccggggcgagcaagaggcugagcguggucacacucaguauaaggagguacaccucccgagagaugacgcccgcucuucgcgcccggcuccccaggacaaaggaaaacucgcugaccugggcaagccccgcagagacgauccacuugauguacuggcugcuccucggcagaaugagagacaggaccagcgccgccaggagaaacuucaucaccaccacugacaaggugaggaacaccagcaccgugagcucguacgccacaaacguggggaacacguggagcccuauggaggcgaagaaaacgauggccaggaagucgcggauggguucgauggagguggcgaucuccucggugaccacggggcccugagaggagacgagcgcuccagccaggaaacagcccagcuccauggagacguccagcagcuccgugaccguuaacauuaagaagauaaaggcagauauucccaagaucaggauuucuuuguuccccuugcuuuccaugugcagcuuccgauaauaggguccaaugagauacuucuuuauaacaagacauaaaagaaaaaccgccgcuagugaaaaaagaaucugaccaaucaaaaccaggauucggagaacuuccacgacaaugcuagaagaugcacuggcgcccgccuguaugagagucggcaugacggccaugaagagcccgagcugcacguccugcgucaccagcaugccgaggagcacggugcuguagucaaugucgccuuucccgggacuaagguucuggucuaugaagaccuugaguucuccguuggcuucaauuagaccggcaucuuuugccauguuaccagauccgggaaaucaaugcuacaaauguucaccuucccagagaagaaaaaugauuuuucugggcacagccccggggucccggcgcaacgugcaggcucgcggcguccaccccagaccccggcggcgcccgcccggcugaccgguaacucugacaggugggcuuccgggguccgcgccgcgcgccugucacuaggccucgggccgccuccgcac

SEQ ID NO: 2286 - RNA, 1017 nt, Homo sapiens
uucaaauauuuuaaccauuauuaaaauggaaagguaaagaauggaucacaagauuucagugaaagagauuauguaucagauuacauaaauaacacauaguuugagaauuaccguuaacauuaagaagauaaaggcagauauucccaagaucaggauuucuuuguuccccuugcuuuccaugugcagcuuccgauaauaggguccaaugagauacuucuuuauaacaagacauaaaagaaaaaccgccgcuagugaaaaaagaaucugaccaaucaaaaccaggauucggagaacuuccacgacaaugcuagaagaugcacuggcgcccgccuguaugagagucggcaugacggccaugaagagcccgagcugcacguccugcgucaccagcaugccgaggagcacggugcuguagucaaugucgccuucuuugucaccccgagcacugcccaugaggaaccuggacacgaggggugugcuugacaaggacagacacguggaaaugaagacgcucugcguggguuugauccgcaagagaugcccccacagcaagccaaaugcaaucauuaacagugucauguaacacggcccuuguaaggaaaucuuccacaccacuugcugggcaauguugacauuggacuguccaaagguuuuuggcaagagcugcuucccgagcggguugacgguggaggggugaacggccacgagggacaccacgccuuucccgggacuaagguucuggucuaugaagaccuugaguucuccguuggcuucaauuagaccggcaucuuuugccauguuaccagauccgggaaaucaaugcuacaaauguucaccuucccagagaagaaaaaugauuuuucugggcacagccccggggucccggcgcaacgugcaggcucgcggcguccaccccagaccccggcggcgcccgcccggcugaccgguaacucugacaggugggcuuccgggguccgcgccgcgcgccugucacuaggccucgggccgccuccgcac

SEQ ID NO: 2287 - RNA, 1360 nt, Homo sapiens
uuaauaaaaacagauuuuaauaaauuucaauuaauuauaccaugaucauaaauuaucuuuauuaaagaauacauauucuugugauuuaaaaccaaauauuuuaagugauauaucuaauagaaauugacaugaaauuauuucauuuaaaaguuacaauaaaaggcaaauagacauccguauuugucucauuuuagaaaacauaggcuuuaagaaucaaaaguaagcuuccaagcucacggccaggauuacaacuucauauuacagaaauguuuaauaacaaauauuugacuaacagauuauaauucugaaguuguacauuuuuaaaagccuuuuaauuuugcuucuuuacuaaaaaaacuaugaacugaugaacucacaauagaaaauuaauaauaauuucagggaaaaaaaaaaaaggcacauccaggcaccacauucaaggugaucgguaaaacgcagugucccgggucuacugcacauaaucaacagacugcaaauaaacuacuccggaaaauucuaaaauaggacaagaauauucuguaaaagccgggauaacacgacugcacugacgcucugcuagagggcuguucuguugccaaggugcgagcuucccagaaggagcagcugcuggccaucuaagcgcucacuccccacagacgcuucccuuccacgguccaucaucuccgagccaucagaggcuggaccgucucuccggucugggcacacaccucgugauugcagcucuccacagcaccggggcgagcaagaggcugagcguggucacacucaguauaaggagguacaccucccgagagaugacgcccgcucuucgcgcccggcuccccaggacaaaggaaaacucgcugaccugggcaagccccgcagagacgauccacuugauguacuggcugcuccucggcagaaugagagacaggaccagcgccgccaggagaaacacuugcugggcaauguugacauuggacuguccaaagguuuuuggcaagagcugcuucccgagcggguugacgguggaggggugaacggccacgagggacaccacgccuuucccgggacuaagguucuggucuaugaagaccuugaguucuccguuggcuucaauuagaccggcaucuuuugccauguuaccagauccgggaaaucaaugcuacaaauguucaccuucccagagaagaaaaaugauuuuucugggcacagccccggggucccggcgcaacgugcaggcucgcggcguccaccccagaccccggcggcgcccgcccggcugaccgguaacucugacaggugggcuuccgggguccgcgccgcgcgccugucacuaggccucgggccgccuccgcac

SEQ ID NO: 2288 - RNA, 1849 nt, Homo sapiens
uucaaauauuuuaaccauuauuaaaauggaaagguaaagaauggaucacaagauuucagugaaagagauuauguaucagauuacauaaauaacacauaguuugagaauuaccguuaacauuaagaagauaaaggcagauauucccaagaucaggauuucuuuguuccccuugcuuuccaugugcagcuuccgauaauaggguccaaugagauacuucuuuauaacaagacauaaaagaaaaaccgccgcuagugaaaaaagaaucugaccaaucaaaaccaggauucggagaacuuccacgacaaugcuagaagaugcacuggcgcccgccuguaugagagucggcaugacggccaugaagagcccgagcugcacguccugcgucaccagcaugccgaggagcacggugcuguagucaaugucgccuucuuugucaccccgagcacugcccaugaggaaccuggacacgaggggugugcuugacaaggacagacacguggaaaugaagacgcucugcguggguuugauccgcaagagaugcccccacagcaagccaaaugcaaucauuaacagugucauguaacacggcccuuguaaggaaaucuuccacaccuuucuuagcuuuucuggagaaaauucuaagccaacaagaaaaagaguaaaaaacaccccaaauucuccuaaugucuccacuugcacaauagacuuaauacuauuuaguccugaaggucccagaaguacaccacaaauaauauaaccaaacauuguaggcaauccuauggcuguacauagccagccacaaggcaaggacagcauuccuaugguaacaauguccuuuauaaaguggugaucugcacgugggaugguugaaucucugggcuuggucaaaauauacugguuguucugggagucaaucagcaugcuaagacccaagucauccuccacuucucguuuuguuauauuuugcuuagaauuggccucuucuuccuccacccucagaacugccucaaaauugacccccuugacugauuuauugucgucaaaagcauguuccucuaucucuuccuccagacgauccgcugccuuucuuacaucuucaagaaucucgucaagcauggauaaacuuugguuuugauguugcauauuuuuaagggcuucaacuugauguuuuucugcugccagaaguuccauauauucuguuucuuccuuuauugcagccucucucagggccuccaggcgcugccggcugcucuccuucauguucacgacaucuuuguaaucccccugcagggcucucugcaguccguagacagcuuggaaaacggaauuuucacuuucauucagcucuuucuggaaaauuucaaacgugugcaccugaaacaguuucucuucauccgacaggcccacgucuuucuccacugcuccaauugcaguuuucaguuuguucagaacugcauucuucuggcggagaagcccugagagcuuccugcagcugucccggacccacugccggcucugcauggcagccaccccucgcccgcggugcaguuugaucacacgcugcgccaccuccucgugcuccacagccugcaccgcccagggaaggacgggaaacagcacccagaagaagcuucuucccaacaccuucaugauccagguccggagggcagggcacagcaauccacgggucucugccccacugagcuugcaugucagacacacauuuucagaucuuuugccauguuaccagauccgggaaaucaaugcuacaaauguucaccuucccagagaagaaaaaugauuuuuccuggccgagcgucgggccggcgugacgugcgcgcggcgcggu

SEQ ID NO: 2289 - RNA, 600 nt, Homo sapiens
uucaaauauuuuaaccauuauuaaaauggaaagguaaagaauggaucacaagauuucagugaaagagauuauguaucagauuacauaaauaacacauaguuugagaauuaccguuaacauuaagaagauaaaggcagauauucccaagaucaggauuucuuuguuccccuugcuuuccaugugcagcuuccgauaauaggguccaaugagauacuucuuuauaacaagacauaaaagaaaaaccgccgcuagugaaaaaagaaucugaccaaucaaaaccaggauucggagaacuuccacgacaaugcacuugcugggcaauguugacauuggacuguccaaagguuuuuggcaagagcugcuucccgagcggguugacgguggaggggugaacggccacgagggacaccacgccuuucccgggacuaagguucuggucuaugaagaccuugaguucuccguuggcuucaauuagaccggcaucuuuugccauguuaccagauccgggaaaucaaugcuacaaauguucaccuucccagagaagaaaaaugauuuuuccuggccgagcgucgggccggcgugacgugcgcgcggcgcggu

SEQ ID NO: 2290 - RNA, 1333 nt, Homo sapiens
uuaauaaaaacagauuuuaauaaauuucaauuaauuauaccaugaucauaaauuaucuuuauuaaagaauacauauucuugugauuuaaaaccaaauauuuuaagugauauaucuaauagaaauugacaugaaauuauuucauuuaaaaguuacaauaaaaggcaaauagacauccguauuugucucauuuuagaaaacauaggcuuuaagaaucaaaaguaagcuuccaagcucacggccaggauuacaacuucauauuacagaaauguuuaauaacaaauauuugacuaacagauuauaauucugaaguuguacauuuuuaaaagccuuuuaauuuugcuucuuuacuaaaaaaacuaugaacugaugaacucacaauagaaaauuaauaauaauuucagggaaaaaaaaaaaaggcacauccaggcaccacauucaaggugaucgguaaaacgcagugucccgggucuacugcacauaaucaacagacugcaaauaaacuacuccggaaaauucuaaaauaggacaagaauauucuguaaaagccgggauaacacgacugcacugacgcucugcuagagggcuguucuguugccaaggugcgagcuucccagaaggagcagcugcuggccaucuaagcgcucacuccccacagacgcuucccuuccacgguccaucaucuccgagccaucagaggcuggaccgucucuccggucugggcacacaccucgugauugcagcucuccacagcaccggggcgagcaagaggcugagcguggucacacucaguauaaggagguacaccucccgagagaugacgcccgcucuucgcgcccggcuccccaggacaaaggaaaacucgcugaccugggcaagccccgcagagacgauccacuugauguacuggcugcuccucggcagaaugagagacaggaccagcgccgccaggagaaacuucaucaccaccacugacaaggugaggaacaccagcaccgugagcucguacgccacaaacguggggaacacguggagcccuuucccgggacuaagguucuggucuaugaagaccuugaguucuccguuggcuucaauuagaccggcaucuuuugccauguuaccagauccgggaaaucaaugcuacaaauguucaccuucccagagaagaaaaaugauuuuucugggcacagccccggggucccggcgcaacgugcaggcucgcggcguccaccccagaccccggcggcgcccgcccggcugaccgguaacucugacaggugggcuuccgggguccgcgccgcgcgccugucacuaggccucgggccgccuccgcac

SEQ ID NO: 2291 - RNA, 991 nt, Homo sapiens
aaauaaaaauagaauuacuuuauuaaucuuugaaaucaguaauuccaaagggugccuuuacccuggcucauguugucaauggcacaccgauuugucuccucucucuaggaaacuugugaugaaugcuccucuuucccccuagauccuccgaaaagggaggaacaacuuuggcggaugaugauguugaaauuuuaagcuuguacaaagaaaauaaagcuucauacuguaaucuggaaaagaagaggaagcaaaaugcaaauagccaaagagccucuuuuauaucaucucugugcagcagcaguaaagggacagagaagaccuaagcaguuugggggcauggggcaaagggaagguaaaagauacaagugugcucugacgggguauauaaugcaucagcugaauguccccacugccaaguuccaucaaaacccagaagaucugcuuucuuguugucccagugaaagucugcauuggcugauuggcaaccaucuacugccacuucugcucgaaggcuuuggggacuuugaggcagcaaaaaaaaaaauacuauggaccccuugaagugcugguggaugcuucacccucaaucaugcacccaggaguggugaacagguuguuucucuguguguuugugguucauauuuuagugugagcaggaucuguagagcuggugaugggcacaaaggcugcaggguuaaggcugcucuggaguccauucagcugcccuuccgcggaggacccuuucgaagccuucacggaaucaccugcccagccucccugucggcagcgagguaauuuagcagaggaagucucuccagucagagucaaagaggaauucuugccauugaggugauucucggccugcgcugacuccuguugagcucggcgacccaucuuggcccuggagguagccaagcuguagcgaagcuccucguccaagucgagcaaauccuccaucuccgcggccgccugacgucacuuccuggaaacc

SEQ ID NO: 2292 - RNA, 1358 nt, Homo sapiens
uaacauuuuuuaagccgguguuuauuuucauauucuucugacauuaaucucuuaaacaucuuucaucauacggcugaccucaccacauguucagguaacauuaauugggauuuggugcuaccaggcuacccaguccugauggcuuuccucccugcuaaucccuggcagccuuaacagacaccacuguccugggugcugacacagaacagucguuaccaccaacuuccacucaggucacccugaugagaaucaccuaagcccaggguaaagaaggucaucucagcuauuuaaggaaaaguacugcaguucagucuguguuucuuaaacaguuuucuuucuucagagaagucucccagguuacaacaucuuuggccccacccuuucaaauucauucagucugaguuuugcccuugugccuggcaaacuucaaucuccucagguuucuuucuccauauuuccuggagaguaugauucuggcucugaaaaaagcucauuuacaagagacaguucagaugcauguaguuguuuguaggcugucguccucaguucagcugacugcuuggaagaaauaccacaaauaguuuugaaaggaggaucugaagcggguauuggaagcuuucugggauguugcccuucugagcacuuguucgugguuggguggggguuugggaaccagggaggcgcaagaacuuggaggugguaccacuuuuuguggcagagugguuggcuucuggccacuagcuguggcacuggaaauucuacaaccugcaccauuauucauuguccauaaauuggaguuagguagugucuggcugccaaagauugccuggugccgggcucgacucugguccaggagcugccgggacugaaguuuuuguuguucaaguugcugcagggcaaauugaagcugauagcugccugcuguggggugauacuugugcugggggaccaccccuguagccuggcuguacacguuguuuucuacuucuccuucccaggcaaaucccccugucugcaggcuccugcuuccaggagagcuggagugauucucgggagcuugggggucugacuguguagaccaugucgggccacuaggacugaugaugggucggaggguugggggagcugaagcacugcuucuguuuaugaugccaguugccaaauucagguuuguuaccucuccagucagagucaaagaggaauucuugccauugaggugauucucggccugcgcugacuccuguugagcucggcgacccaucuuggcccuggagguagccaagcuguagcgaagcuccucguccaagucgagcaaauccuccaucuccgcggccgccugacgucacuuccuggaaacc

SEQ ID NO: 2293 - RNA, 1492 nt, Homo sapiens
aaauaaaaauagaauuacuuuauuaaucuuugaaaucaguaauuccaaagggugccuuuacccuggcucauguugucaauggcacaccgauuugucuccucucucuaggaaacuugugaugaaugcuccucuuucccccuagauccuccgaaaagggaggaacaacuuuggcggaugaugauguugaaauuuuaagcuuguacaaagaaaauaaagcuucauacuguaaucuggaaaagaagaggaagcaaaaugcaaauagccaaagagccucuuuuauaucaucucugugcagcagcaguaaagggacagagaagaccuaagcaguuugggggcauggggcaaagggaagguaaaagauacaagugugcucugacgggguauauaaugcaucagcugaauguccccacugccaaguuccaucaaaacccagaagaucugcuuucuuguugucccagugaaagucugcauuggcugauuggcaaccaucuacugccacuucugcucgaaggcuuuggggacuuugaggcagcaaaaaaaaaaauacuauggaccccuugaagugcugguggaugcuucacccucaaucaugcacccaggaguggugaacagguuguuucucuguguguuugugguucauauuuuagugugagcaggaucuguagagcuggugaugggcacaaaggcugcaggguuaaggcugcucuggaguccauucagcugcccuuccgcggaggacccuuuggaagcuuucugggauguugcccuucugagcacuuguucgugguuggguggggguuugggaaccagggaggcgcaagaacuuggaggugguaccacuuuuuguggcagagugguuggcuucuggccacuagcuguggcacuggaaauucuacaaccugcaccauuauucauuguccauaaauuggaguuagguagugucuggcugccaaagauugccuggugccgggcucgacucugguccaggagcugccgggacugaaguuuuuguuguucaaguugcugcagggcaaauugaagcugauagcugccugcuguggggugauacuugugcugggggaccaccccuguagccuggcuguacacguuguuuucuacuucuccuucccaggcaaaucccccugucugcaggcuccugcuuccaggagagcuggagugauucucgggagcuugggggucugacuguguagaccaugucgggccacuaggacugaugaugggucggaggguugggggagcugaagcacugcuucuguuuaugaugccaguugccaaauucagguuuguuaccucuccagucagagucaaagaggaauucuugccauugaggugauucucggccugcgcugacuccuguugagcucggcgacccaucuuggcccuggagguagccaagcuguagcgaagcuccucguccaagucgagcaaauccuccaucuccgcggccgccugacgucacuuccuggaaacc

SEQ ID NO: 2294 - RNA, 2485 nt, Homo sapiens
uggcauuuuuaaaaaaaauaaguuuauuuacauuucacuuacuuucaaaaggaugaaaauauauuuauaaaggaaguagucucauuuuauuuaacccauuugcauuugacuuagaaucagaggucuaaggguacccaaagaauuuauccaguucaacuuuccauuuuuagcuaagacugaaauuauaccauugcaggcagaugaaaaucuacuccacuuauagguaaacaucaacuaauauauauguuauaaaaacacuagcuuuaguaaaaucugucauaacauccaauaaaucugcaauaaaagacauagcuaucacaauauaagacauuaaaaaauuuaugugcagcaauaaaaacuggaauuuauacaggagaaaugauaauuggcuacuaagucaauagcaucacaguaacaguacccagugucuuucuuauucaaguauacacgcuauuuuuaagacuuaaaauuaagucuuaaggcuauaauaaagauaucaguagcuaggauguauauacacaauuauuuaauaaacaccaugaaaaagaaagcacagagauaaaaauacccuuaaauucuguagcaauuacaaacauguuaacauuaucacuauauauuugacucauaaauuuuaaccaauuuauacacuuuaaaacuagcauugaguuuuauaaaaauacuaauggccaaacauuuuuaaaaacuaaggcaaucuuuaucuauauuucaguagucuuuguuuuaugcuuuucuuucuuccaccaccaaagucuuucuccuaaccaccauucacucaaaacaacaacaguggucucuagcaccuguugcuguggaaguauuauuacauucgaaaacuucuaguucuuugaaaugguuggaaaggcuucuuuagugcccacauuagcagcugugguuucgguuuggguuuuucaggaaacagaagugcugcacuuucugguguaggaaaucguucuugauagacuucaggauaggauuucugaaacuggacucuucguagaugagccacacgcuccucuauagaggucugcaaggccaaagggacuuucagaauuuccugguaauuguccaucagaaacguuaccaaucuagcagcuaauaacucauccaaguccacuucauccuuggaacacaagaugcaacgggaaaaugucugaaccaucaguguucggguaccaaagccaucacacagggguggcaucucuuuguuuaagcaaauccuugccaucauccucaucaauagcuguaacuuucuccuauuuucaggagguaggagaaggcagcaaaucugaaaugcuucaacugccacuuucuccuucuguaacaaacccaguacacugacaaaagcaucaaaaagaugaaauguaaguagaggcucuuucaagugaccauaguaaucagcuaugguuuuaaagacaucuuuuucaaaucccaaguacauaggcugcuucaaaucagaacaguugggccaauuugccaaacacuucauagcugacagcacccaaugaggaaguucuuuugacuugucaucaagaauaacaacucccugcuugcuaacacuauauacauuauggaugaugaacuucgaauugacaaguuugacgucuaaaacuucuucuaaggaauccaggccaagaauuuucuguaaguaugauaaugucauagacuuccauaucucuucuacauuggccucugucagcugucugcgguggacaagacggcaagcuggcaccucuccaauugcaauacugugacgcuuguaccacaucucagaauucaucacaacuggccucacugggauguucucuugugaagugccuggugggagaucauuccauucuggaaauuuaauaacauccuuuugguuugggggcuucuuuggauaugguuucaggggugaagaaggaggaaaucuguauaagugacgauugucuucaaaaucuuccucaccccauuuucccuugaugucuucaauaacgugauucuucaggaauuuuuuuagcagcuggaccguuuguuugcgggucacuucagggccgaaguuuugacugcaccucagcagcucaugcagccaauccacagcuucggccgcugugaaacaaugcucauagcucuugaaacgacagcgauguuuccguaacggcaucuuagcacgaaaaagcuccacggucucauuccaacuuuugcuccgagaaagcaaaucacagguauuucuuuucaucgugguguuuuaaguaauuaaaaugggaacuaguguuuccagugucaaugaucucacugcacguauccacucaaaagccaacuggaaugacagucuugaagaugcaaugucagcuauuuaggacagaaacauccaaggccgugucagaacucaauuacgacuacauaugcauuaaggcaggaacuggcaggccucaggguacgccaacuauaggacucgugcuucucguacgcugggcuauaaucu

SEQ ID NO: 2295 - RNA, 2671 nt, Homo sapiens
uggcauuuuuaaaaaaaauaaguuuauuuacauuucacuuacuuucaaaaggaugaaaauauauuuauaaaggaaguagucucauuuuauuuaacccauuugcauuugacuuagaaucagaggucuaaggguacccaaagaauuuauccaguucaacuuuccauuuuuagcuaagacugaaauuauaccauugcaggcagaugaaaaucuacuccacuuauagguaaacaucaacuaauauauauguuauaaaaacacuagcuuuaguaaaaucugucauaacauccaauaaaucugcaauaaaagacauagcuaucacaauauaagacauuaaaaaauuuaugugcagcaauaaaaacuggaauuuauacaggagaaaugauaauuggcuacuaagucaauagcaucacaguaacaguacccagugucuuucuuauucaaguauacacgcuauuuuuaagacuuaaaauuaagucuuaaggcuauaauaaagauaucaguagcuaggauguauauacacaauuauuuaauaaacaccaugaaaaagaaagcacagagauaaaaauacccuuaaauucuguagcaauuacaaacauguuaacauuaucacuauauauuugacucauaaauuuuaaccaauuuauacacuuuaaaacuagcauugaguuuuauaaaaauacuaauggccaaacauuuuuaaaaacuaaggcaaucuuuaucuauauuucaguagucuuuguuuuaugcuuuucuuucuuccaccaccaaagucuuucuccuaaccaccauucacucaaaacaacaacaguggucucuagcaccuguugcuguggaaguauuauuacauucgaaaacuucuaguucuuugaaaugguuggaaaggcuucuuuagugcccacauuagcagcugugguuucgguuuggguuuuucaggaaacagaagugcugcacuuucugguguaggaaaucguucuugauagacuucaggauaggauuucugaaacugcuucaguuucuucuuuuucucuuuguuggagaguuuggcaucuguuaugacuuccuccaacaaggcugccagagguuccugagagccauaugaucuuugauauucaaauuccucuggacuaauuugacggcaaaaugauggagcagauaaagugauauccauaucagcuccuggguauuuuaucuggacucuucguagaugagccacacgcuccucuauagaggucugcaaggccaaagggacuuucagaauuuccugguaauuguccaucagaaacguuaccaaucuagcagcuaauaacucauccaaguccacuucauccuuggaacacaagaugcaacgggaaaaugucugaaccaucaguguucggguaccaaagccaucacacagggguggcaucucuuuguuuaagcaaauccuugccaucauccucaucaauagcuguaacuuucuccuauuuucaggagguaggagaaggcagcaaaucugaaaugcuucaacugccacuuucuccuucuguaacaaacccaguacacugacaaaagcaucaaaaagaugaaauguaaguagaggcucuuucaagugaccauaguaaucagcuaugguuuuaaagacaucuuuuucaaaucccaaguacauaggcugcuucaaaucagaacaguugggccaauuugccaaacacuucauagcugacagcacccaaugaggaaguucuuuugacuugucaucaagaauaacaacucccugcuugcuaacacuauauacauuauggaugaugaacuucgaauugacaaguuugacgucuaaaacuucuucuaaggaauccaggccaagaauuuucuguaaguaugauaaugucauagacuuccauaucucuucuacauuggccucugucagcugucugcgguggacaagacggcaagcuggcaccucuccaauugcaauacugugacgcuuguaccacaucucagaauucaucacaacuggccucacugggauguucucuugugaagugccuggugggagaucauuccauucuggaaauuuaauaacauccuuuugguuugggggcuucuuuggauaugguuucaggggugaagaaggaggaaaucuguauaagugacgauugucuucaaaaucuuccucaccccauuuucccuugaugucuucaauaacgugauucuucaggaauuuuuuuagcagcuggaccguuuguuugcgggucacuucagggccgaaguuuugacugcaccucagcagcucaugcagccaauccacagcuucggccgcugugaaacaaugcucauagcucuugaaacgacagcgauguuuccguaacggcaucuuagcacgaaaaagcuccacggucucauuccaacuuuugcuccgagaaagcaaaucacagguauuucuuuucaucgugguguuuuaaguaauuaaaaugggaacuaguguuuccagugucaaugaucucacugcacguauccacucaaaagccaacuggaaugacagucuugaagaugcaaugucagcuauuuaggacagaaacauccaaggccgugucagaacucaauuacgacuacauaugcauuaaggcaggaacuggcaggccucaggguacgccaacuauaggacucgugcuucucguacgcugggcuauaaucu

SEQ ID NO: 2296 - RNA, 2686 nt, Homo sapiens
uggcauuuuuaaaaaaaauaaguuuauuuacauuucacuuacuuucaaaaggaugaaaauauauuuauaaaggaaguagucucauuuuauuuaacccauuugcauuugacuuagaaucagaggucuaaggguacccaaagaauuuauccaguucaacuuuccauuuuuagcuaagacugaaauuauaccauugcaggcagaugaaaaucuacuccacuuauagguaaacaucaacuaauauauauguuauaaaaacacuagcuuuaguaaaaucugucauaacauccaauaaaucugcaauaaaagacauagcuaucacaauauaagacauuaaaaaauuuaugugcagcaauaaaaacuggaauuuauacaggagaaaugauaauuggcuacuaagucaauagcaucacaguaacaguacccagugucuuucuuauucaaguauacacgcuauuuuuaagacuuaaaauuaagucuuaaggcuauaauaaagauaucaguagcuaggauguauauacacaauuauuuaauaaacaccaugaaaaagaaagcacagagauaaaaauacccuuaaauucuguagcaauuacaaacauguuaacauuaucacuauauauuugacucauaaauuuuaaccaauuuauacacuuuaaaacuagcauugaguuuuauaaaaauacuaauggccaaacauuuuuaaaaacuaaggcaaucuuuaucuauauuucaguagucuuuguuuuaugcuuuucuuucuuccaccaccaaagucuuucuccuaaccaccauucacucaaaacaacaacaguggucucuagcaccuguugcuguggaaguauuauuacauucgaaaacuucuaguucuuugaaaugguuggaaaggcuucuuuagugcccacauuagcagcugugguuucgguuuggguuuuucaggaaacagaagugcugcacuuucugguguaggaaaucguucuugauagacuucaggauaggauuucugaaacuggacucuucguagaugagccacacgcuccucuauagaggucugcaaggccaaagggacuuucagaauuuccugguaauuguccaucagaaacguuaccaaucuagcagcuaauaacucauccaaguccacuucauccuuggaacacaagaugcaacgggaaaaugucugaaccaucaguguucggguaccaaagccaucacacagggguggcaucucuuuguuuaagcaaauccuugccaucauccucaucaauagcuguaacuuucuccuauuuucaggagguaggagaaggcagcaaaucugaaaugcuucaacugccacuuucuccuucuguaacaaacccaguacacugacaaaagcaucaaaaagaugaaauguaaguagaggcucuuucaagugaccauaguaaucagcuaugguuuuaaagacaucuuuuucaaaucccaaguacauaggcugcuucaaaucagaacaguugggccaauuugccaaacacuucauagcugacagcacccaaugaggaaguucuuuugacuugucaucaagaauaacaacucccugcuugcuaacacuauauacauuauggaugaugaacuucgaauugacaaguuugacgucuaaaacuucuucuaaggaauccaggccaagaauuuucuguaaguaugauaaugucauagacuuccauaucucuucuacauuggccucugucagcugucugcgguggacaagacggcaagcuggcaccucuccaauugcaauacugugacgcuuguaccacaucucagaauucaucacaacuggccucacugggauguucucuugugaagugccuggugggagaucauuccauucuggaaauuuaauaacauccuuuugguuugggggcuucuuuggauaugguuucaggggugaagaaggaggaaaucuguauaagugacgauugucuucaaaaucuuccucaccccauuuucccuugaugucuucaauaacgugauucuucaggaauuuuuuuagcagcuggaccguuuguuugcgggucacuucagggccgaaguuuugacugcaccucagcagcucaugcagccaauccacagcuucggccgcugugaaacaaugcucauagcucuugaaacgacagcgauguuuccguaacggcaucuuagcacgaaaaagcuccacggucucauuccaaugguuguugacuugucucaguuccuugcugacuguuggcuggaggccuccauauuuuaccauguggccuucuuccauaggcugcuugagugucuuugugaguugacagcuagcugccuccagagugagugauuggagaaagagaaacuuuucccuaguauuccugucuuccucuccacaucucuuacuuuuugucacuuuugcuccgagaaagcaaaucacagguauuucuuuucaucgugguguuuuaaguaauuaaaaugggaacuaguguuuccagugucaaugaucucacugcacguauccacucaaaagccaacuggaaugacuuguucugggaccuuagacaaguguacuucugagccucggcuucuuccuguaaagcagggauccugguaguuccucacaugucaguacuuauucagugguaacuauuaucaucacugucuucuuagcagaacauucccaggacacagaaagccucucuuu

SEQ ID NO: 2297 - RNA, 2872 nt, Homo sapiens
uggcauuuuuaaaaaaaauaaguuuauuuacauuucacuuacuuucaaaaggaugaaaauauauuuauaaaggaaguagucucauuuuauuuaacccauuugcauuugacuuagaaucagaggucuaaggguacccaaagaauuuauccaguucaacuuuccauuuuuagcuaagacugaaauuauaccauugcaggcagaugaaaaucuacuccacuuauagguaaacaucaacuaauauauauguuauaaaaacacuagcuuuaguaaaaucugucauaacauccaauaaaucugcaauaaaagacauagcuaucacaauauaagacauuaaaaaauuuaugugcagcaauaaaaacuggaauuuauacaggagaaaugauaauuggcuacuaagucaauagcaucacaguaacaguacccagugucuuucuuauucaaguauacacgcuauuuuuaagacuuaaaauuaagucuuaaggcuauaauaaagauaucaguagcuaggauguauauacacaauuauuuaauaaacaccaugaaaaagaaagcacagagauaaaaauacccuuaaauucuguagcaauuacaaacauguuaacauuaucacuauauauuugacucauaaauuuuaaccaauuuauacacuuuaaaacuagcauugaguuuuauaaaaauacuaauggccaaacauuuuuaaaaacuaaggcaaucuuuaucuauauuucaguagucuuuguuuuaugcuuuucuuucuuccaccaccaaagucuuucuccuaaccaccauucacucaaaacaacaacaguggucucuagcaccuguugcuguggaaguauuauuacauucgaaaacuucuaguucuuugaaaugguuggaaaggcuucuuuagugcccacauuagcagcugugguuucgguuuggguuuuucaggaaacagaagugcugcacuuucugguguaggaaaucguucuugauagacuucaggauaggauuucugaaacugcuucaguuucuucuuuuucucuuuguuggagaguuuggcaucuguuaugacuuccuccaacaaggcugccagagguuccugagagccauaugaucuuugauauucaaauuccucuggacuaauuugacggcaaaaugauggagcagauaaagugauauccauaucagcuccuggguauuuuaucuggacucuucguagaugagccacacgcuccucuauagaggucugcaaggccaaagggacuuucagaauuuccugguaauuguccaucagaaacguuaccaaucuagcagcuaauaacucauccaaguccacuucauccuuggaacacaagaugcaacgggaaaaugucugaaccaucaguguucggguaccaaagccaucacacagggguggcaucucuuuguuuaagcaaauccuugccaucauccucaucaauagcuguaacuuucuccuauuuucaggagguaggagaaggcagcaaaucugaaaugcuucaacugccacuuucuccuucuguaacaaacccaguacacugacaaaagcaucaaaaagaugaaauguaaguagaggcucuuucaagugaccauaguaaucagcuaugguuuuaaagacaucuuuuucaaaucccaaguacauaggcugcuucaaaucagaacaguugggccaauuugccaaacacuucauagcugacagcacccaaugaggaaguucuuuugacuugucaucaagaauaacaacucccugcuugcuaacacuauauacauuauggaugaugaacuucgaauugacaaguuugacgucuaaaacuucuucuaaggaauccaggccaagaauuuucuguaaguaugauaaugucauagacuuccauaucucuucuacauuggccucugucagcugucugcgguggacaagacggcaagcuggcaccucuccaauugcaauacugugacgcuuguaccacaucucagaauucaucacaacuggccucacugggauguucucuugugaagugccuggugggagaucauuccauucuggaaauuuaauaacauccuuuugguuugggggcuucuuuggauaugguuucaggggugaagaaggaggaaaucuguauaagugacgauugucuucaaaaucuuccucaccccauuuucccuugaugucuucaauaacgugauucuucaggaauuuuuuuagcagcuggaccguuuguuugcgggucacuucagggccgaaguuuugacugcaccucagcagcucaugcagccaauccacagcuucggccgcugugaaacaaugcucauagcucuugaaacgacagcgauguuuccguaacggcaucuuagcacgaaaaagcuccacggucucauuccaaugguuguugacuugucucaguuccuugcugacuguuggcuggaggccuccauauuuuaccauguggccuucuuccauaggcugcuugagugucuuugugaguugacagcuagcugccuccagagugagugauuggagaaagagaaacuuuucccuaguauuccugucuuccucuccacaucucuuacuuuuugucacuuuugcuccgagaaagcaaaucacagguauuucuuuucaucgugguguuuuaaguaauuaaaaugggaacuaguguuuccagugucaaugaucucacugcacguauccacucaaaagccaacuggaaugacuuguucugggaccuuagacaaguguacuucugagccucggcuucuuccuguaaagcagggauccugguaguuccucacaugucaguacuuauucagugguaacuauuaucaucacugucuucuuagcagaacauucccaggacacagaaagccucucuuu

SEQ ID NO: 2298 - RNA, 2490 nt, Homo sapiens
uggcauuuuuaaaaaaaauaaguuuauuuacauuucacuuacuuucaaaaggaugaaaauauauuuauaaaggaaguagucucauuuuauuuaacccauuugcauuugacuuagaaucagaggucuaaggguacccaaagaauuuauccaguucaacuuuccauuuuuagcuaagacugaaauuauaccauugcaggcagaugaaaaucuacuccacuuauagguaaacaucaacuaauauauauguuauaaaaacacuagcuuuaguaaaaucugucauaacauccaauaaaucugcaauaaaagacauagcuaucacaauauaagacauuaaaaaauuuaugugcagcaauaaaaacuggaauuuauacaggagaaaugauaauuggcuacuaagucaauagcaucacaguaacaguacccagugucuuucuuauucaaguauacacgcuauuuuuaagacuuaaaauuaagucuuaaggcuauaauaaagauaucaguagcuaggauguauauacacaauuauuuaauaaacaccaugaaaaagaaagcacagagauaaaaauacccuuaaauucuguagcaauuacaaacauguuaacauuaucacuauauauuugacucauaaauuuuaaccaauuuauacacuuuaaaacuagcauugaguuuuauaaaaauacuaauggccaaacauuuuuaaaaacuaaggcaaucuuuaucuauauuucaguagucuuuguuuuaugcuuuucuuucuuccaccaccaaagucuuucuccuaaccaccauucacucaaaacaacaacaguggucucuagcaccuguugcuguggaaguauuauuacauucgaaaacuucuaguucuuugaaaugguuggaaaggcuucuuuagugcccacauuagcagcugugguuucgguuuggguuuuucaggaaacagaagugcugcacuuucugguguaggaaaucguucuugauagacuucaggauaggauuucugaaacuggacucuucguagaugagccacacgcuccucuauagaggucugcaaggccaaagggacuuucagaauuuccugguaauuguccaucagaaacguuaccaaucuagcagcuaauaacucauccaaguccacuucauccuuggaacacaagaugcaacgggaaaaugucugaaccaucaguguucggguaccaaagccaucacacagggguggcaucucuuuguuuaagcaaauccuugccaucauccucaucaauagcuguaacuuucuccuauuuucaggagguaggagaaggcagcaaaucugaaaugcuucaacugccacuuucuccuucuguaacaaacccaguacacugacaaaagcaucaaaaagaugaaauguaaguagaggcucuuucaagugaccauaguaaucagcuaugguuuuaaagacaucuuuuucaaaucccaaguacauaggcugcuucaaaucagaacaguugggccaauuugccaaacacuucauagcugacagcacccaaugaggaaguucuuuugacuugucaucaagaauaacaacucccugcuugcuaacacuauauacauuauggaugaugaacuucgaauugacaaguuugacgucuaaaacuucuucuaaggaauccaggccaagaauuuucuguaaguaugauaaugucauagacuuccauaucucuucuacauuggccucugucagcugucugcgguggacaagacggcaagcuggcaccucuccaauugcaauacugugacgcuuguaccacaucucagaauucaucacaacuggccucacugggauguucucuugugaagugccuggugggagaucauuccauucuggaaauuuaauaacauccuuuugguuugggggcuucuuuggauaugguuucaggggugaagaaggaggaaaucuguauaagugacgauugucuucaaaaucuuccucaccccauuuucccuugaugucuucaauaacgugauucuucaggaauuuuuuuagcagcuggaccguuuguuugcgggucacuucagggccgaaguuuugacugcaccucagcagcucaugcagccaauccacagcuucggccgcugugaaacaaugcucauagcucuugaaacgacagcgauguuuccguaacggcaucuuagcacgaaaaagcuccacggucucauuccaacuuuugcuccgagaaagcaaaucacagguauuucuuuucaucgugguguuuuaaguaauuaaaaugggaacuaguguuuccagugucaaugaucucacugcacguauccacucaaaagccaacuggaaugacuuguucugggaccuuagacaaguguacuucugagccucggcuucuuccuguaaagcagggauccugguaguuccucacaugucaguacuuauucagugguaacuauuaucaucacugucuucuuagcagaacauucccaggacacagaaagccucucuuu

SEQ ID NO: 2299 - RNA, 2025 nt, Homo sapiens
uaaaggagacagggaacuuuggggauguuuauugcaaaugguuauaauuuaagugauauuuacaauuguuuaagacagagggcaaacaggcucugagccaggccucagcuuuagaggcccauccuggagaggaaauggcacuugcagggaacaugagcucaaucacuauugcucacuaagcacagggucacacuggagucaucuuagggaggcugcgaggaagaaaagggagugcacagagccaugaagcaacuacuuuaaauucugaaucuugcuguguucccacugagcaugcugccuuccuagagcaggccuuggagccaucccagggacuaacacagauccuuccuggggcgcaggcuucucacacuagcguagggugccuaggucauccucaucauuguuuaucaucacagacuucuuucugccugccagauaucuucccuacuuguggcuuuaaaacaccagcaggagggaagucaaggaauguucuuguuaguauaaauccauagcaaaaacgauuugagaacuggaugcuucccaggguuggcagguguguggaugguucccugaauucuuuauccacaggaugcuugaauggguggugcuguugaggcugacaaaugucugagcuuuacagacuuguucauguuuuugagaaccuauggggauacucauugggcagaaucagagcccagcagaacacggggacggggaaggguaaagaggggaaaccgacagaguccugaggucaucccgggaggaagggggacuacuuccagaagcagcagcacaaagggcucugccgagacucugcggaggggguccaggguacuggggguggagggguccccucuugcagugugggguuacuguuuggguaaagcgaagucccaggcaguuuccugugcacauuuccacauggccugcaugaggcgagugaaacccaugucuuugggcuuuuccaggccucucaucagccguugcuucaugauggaaacaaauuccuuauugcucaguucgccauugccaucacagucaaagagugcaaacaccacaucacacacguggucugagagcuccacuuuagccacuguccuggccaccugcugcauggucacuuuaucaagagaugcuccagccauaugguaaaaacucaaugcaguguccacaucauuaauguucuuuaggaaaguaaagaaguucuccaccuccugaaaugucagacccauggagcacuucgccaguacuuccuccuggaaucucaggaauccuuccugaaccucaacuucauugaggaaaaaggcaaggaagugagugaagggcugcuuucuucgaaaaguguccaaaagaacaucaauccguguucgggcugaaauuacaccauuucgaugcuggccagugauuacaauuuccccgucuuguccagguuuaggaaugcuaauagaaguuuuggucuccauuucuauuuucuuccuaguguccccucucuuuccaacuauaugcuuauagagcaagcugggggcccucaaaguagaccggaauccuuguggggucugcuccaccucguaggcaucacagggcucaucagcacacuccauggagccuugauagaaguccucuucaucuucuucauguugauaggucuguucuuggacuggauucuuccuguaauuccggccaucaauucuuauaagcuguggacgcagaacuuccaugacacuuucuccaaaugauauuccaauuaugcccgugagggaagccgaggcccugaaucaucaaagagaaggagaagaggacuaggcggcugcagguaaaccaagguagggcgaggaggaggacccggaauuccucuacgcgagcgcguucucugcuccccuccucgcgucuccgccccggccacgcccaccacggcacgggcgcgcgcacgccgccuucgccgcuggcuccgucuguuggggggcgaacacgccgcgguccucgucguggugagcgcagccacucaggcugguccugggggugggg

SEQ ID NO: 2300 - RNA, 2343 nt, Homo sapiens
uaaaggagacagggaacuuuggggauguuuauugcaaaugguuauaauuuaagugauauuuacaauuguuuaagacagagggcaaacaggcucugagccaggccucagcuuuagaggcccauccuggagaggaaauggcacuugcagggaacaugagcucaaucacuauugcucacuaagcacagggucacacuggagucaucuuagggaggcugcgaggaagaaaagggagugcacagagccaugaagcaacuacuuuaaauucugaaucuugcuguguucccacugagcaugcugccuuccuagagcaggccuuggagccaucccagggacuaacacagauccuuccuggggcgcaggcuucucacacuagcguagggugccuaggucauccucaucauuguuuaucaucacagacuucuuucugccugccagauaucuucccuacuuguggcuuuaaaacaccagcaggagggaagucaaggaauguucuuguuaguauaaauccauagcaaaaacgauuugagaacuggaugcuucccaggguuggcagguguguggaugguucccugaauucuuuauccacaggaugcuugaauggguggugcuguugaggcugacaaaugucugagcuuuacagacuuguucauguuuuugagaaccuauggggauacucauugggcagaaucagagcccagcagaacacggggacggggaaggguaaagaggggaaaccgacagaguccugaggucaucccgggaggaagggggacuacuuccagaagcagcagcacaaagggcucugccgagacucugcggaggggguccaggguacuggggguggagggguccccucuugcagugugggguuacuguuuggguaaagcgaagucccaggcaguuuccugugcacauuuccacauggccugcaugaggcgagugaaacccaugucuuugggcuuuuccaggccucucaucagccguugcuucaugauggaaacaaauuccuuauugcucaguucgccauugccaucacagucaaagagugcaaacaccacaucacacacguggucugagagcuccacuuuagccacuguccuggccaccugcugcauggucacauuggggucuuuccugaauaguguauucauaacuguagcaugcaguuucacacuauuccacucuuucacuauuaguccagaugccugaaaacguuccagcacucgaucaacuaauucuuguagccuguuggagccaucuuucauauggacuuuggcguaaagaacauccaccaugccaggaucaucauucauguauucuaucccugccaucuccacuucuagggguuuacccccagaaauaucauuaaugaauuccucuuuacacugcuguagcaucucacaugucugcuggaucucuuccucacucaaaagcaccaacaucccaauaguuagaugaagcuuuuuaggauucuggaaaaugcugcugucaaccccaugauccauggagcacuucgccaguacuuccuccuggaaucucaggaauccuuccugaaccucaacuucauugaggaaaaaggcaaggaagugagugaagggcugcuuucuucgaaaaguguccaaaagaacaucaauccguguucgggcugaaauuacaccauuucgaugcuggccagugauuacaauuuccccgucuuguccagguuuaggaaugcuaauagaaguuuuggucuccauuucuauuuucuuccuaguguccccucucuuuccaacuauaugccuggacuuccaaguauaaauauucugacaauccaaaguuaucuucuggaacccacagucguuugauguguucaagugaaugagauuauagagcaagcugggggcccucaaaguagaccggaauccuuguggggucugcuccaccucguaggcaucacagggcucaucagcacacuccauggagccuugauagaaguccucuucaucuucuucauguugauaggucuguucuuggacuggauucuuccuguaauuccggccaucaauucuuauaagcuguggacgcagaacuuccaugacacuuucuccaaaugauauuccaauuaugcccugcagggacuagaaaaauggagaagguaggaggagaaacaggagacugcugcagcagacgugcgauaggaaauuuccccaggccggguuugaccgagugcgcaugcgggccgagggcuggcgccugcgcagugggacagcgccgauggcguaguuuccuggggacccagcugggugggaaaaguggcuaggaguuagcuugggagccgcugguguucugagcgcuccccucucu

SEQ ID NO: 2301 - RNA, 1506 nt, Homo sapiens
uaaaggagacagggaacuuuggggauguuuauugcaaaugguuauaauuuaagugauauuuacaauuguuuaagacagagggcaaacaggcucugagccaggccucagcuuuagaggcccauccuggagaggaaauggcacuugcagggaacaugagcucaaucacuauugcucacuaagcacagggucacacuggagucaucuuagggaggcugcgaggaagaaaagggagugcacagagccaugaagcaacuacuuuaaauucugaaucuugcuguguucccacugagcaugcugccuuccuagagcaggccuuggagccaucccagggacuaacacagauccuuccuggggcgcaggcuucucacacuagcguagggugccuaggucauccucaucauuguuuaucaucacagacuucuuucugccugccagauaucuucccuacuuguggcuuuaaaacaccagcaggagggaagucaaggaauguucuuguuaguauaaauccauagcaaaaacgauuugagaacuggaugcuucccaggguuggcagguguguggaugguucccugaauucuuuauccacaggaugcuugaauggguggugcuguugaggcugacaaaugucugagcuuuacagacuuguucauguuuuugagaaccuauggggauacucauugggcagaaucagagcccagcagaacacggggacggggaaggguaaagaggggaaaccgacagaguccugaggucaucccgggaggaagggggacuacuuccagaagcagcagcacaaagggcucugccgagacucugcggaggggguccaggguacuggggguggagggguccccucuugcagugugggguuacuguuuggguaaagcgaagucccaggcaguuuccugugcacauuuccacauggccugcaugaggcgagugaaacccaugucuuugggcuuuuccaggccucucaucagccguugcuucaugauggaaacaaauuccuuauugcucaguucgccauugccaucacagucaaagagugcaaacaccacaucacacacguggucugagagcuccacuuuagccacuguccuggccaccugcugcauggucacuuuaucaagagaugcuccagccauaugguaaaaacucaaugcaguguccacaucauuaauguucuuuaggaaaguaaagaaguucuccaccuccugaaaugucagacccauggagcacuucgccaguacuuccuccuggaaucucaggaauccuuccugaaccucaacuucauugaggaaaaaggcaaggaagugagugaagggcugcuuucuucgaaaaguguccaaaagaacaucaauccguguucgggcugaaauuacaccauuucgaugcuggccagugauuacaauuuccccgucuuguccagguuuaggaaugcuaauagaaguuuuggucuccauuucuauuuucuuccuaguguccccucucuuuccaacuauaugc

SEQ ID NO: 2302 - RNA, 2070 nt, Homo sapiens
uaaaggagacagggaacuuuggggauguuuauugcaaaugguuauaauuuaagugauauuuacaauuguuuaagacagagggcaaacaggcucugagccaggccucagcuuuagaggcccauccuggagaggaaauggcacuugcagggaacaugagcucaaucacuauugcucacuaagcacagggucacacuggagucaucuuagggaggcugcgaggaagaaaagggagugcacagagccaugaagcaacuacuuuaaauucugaaucuugcuguguucccacugagcaugcugccuuccuagagcaggccuuggagccaucccagggacuaacacagauccuuccuggggcgcaggcuucucacacuagcguagggugccuaggucauccucaucauuguuuaucaucacagacuucuuucugccugccagauaucuucccuacuuguggcuuuaaaacaccagcaggagggaagucaaggaauguucuuguuaguauaaauccauagcaaaaacgauuugagaacuggaugcuucccaggguuggcagguguguggaugguucccugaauucuuuauccacaggaugcuugaauggguggugcuguugaggcugacaaaugucugagcuuuacagacuuguucauguuuuugagaaccuauggggauacucauugggcagaaucagagcccagcagaacacggggacggggaaggguaaagaggggaaaccgacagaguccugaggucaucccgggaggaagggggacuacuuccagaagcagcagcacaaagggcucugccgagacucugcggaggggguccaggguacuggggguggagggguccccucuugcagugugggguuacuguuuggguaaagcgaagucccaggcaguuuccugugcacauuuccacauggccugcaugaggcgagugaaacccaugucuuugggcuuuuccaggccucucaucagccguugcuucaugauggaaacaaauuccuuauugcucaguucgccauugccaucacagucaaagagugcaaacaccacaucacacacguggucugagagcuccacuuuagccacuguccuggccaccugcugcauggucacuuuaucaagagaugcuccagccauaugguaaaaacucaaugcaguguccacaucauuaauguucuuuaggaaaguaaagaaguucuccaccuccugaaaugucagacccauggagcacuucgccaguacuuccuccuggaaucucaggaauccuuccugaaccucaacuucauugaggaaaaaggcaaggaagugagugaagggcugcuuucuucgaaaaguguccaaaagaacaucaauccguguucgggcugaaauuacaccauuucgaugcuggccagugauuacaauuuccccgucuuguccagguuuaggaaugcuaauagaaguuuuggucuccauuucuauuuucuuccuaguguccccucucuuuccaacuauaugccuggacuuccaaguauaaauauucugacaauccaaaguuaucuucuggaacccacagucguuugauguguucaagugaaugagauuauagagcaagcugggggcccucaaaguagaccggaauccuuguggggucugcuccaccucguaggcaucacagggcucaucagcacacuccauggagccuugauagaaguccucuucaucuucuucauguugauaggucuguucuuggacuggauucuuccuguaauuccggccaucaauucuuauaagcuguggacgcagaacuuccaugacacuuucuccaaaugauauuccaauuaugcccugcagggacuagaaaaauggagaagguaggaggagaaacaggagacugcugcagcagacgugcgauaggaaauuuccccaggccggguuugaccgagugcgcaugcgggccgagggcuggcgccugcgcagugggacagcgccgauggcguaguuuccuggggacccagcugggugggaaaaguggcuaggaguuagcuugggagccgcugguguucugagcgcuccccucucu

SEQ ID NO: 2303 - RNA, 2163 nt, Homo sapiens
uaaaggagacagggaacuuuggggauguuuauugcaaaugguuauaauuuaagugauauuuacaauuguuuaagacagagggcaaacaggcucugagccaggccucagcuuuagaggcccauccuggagaggaaauggcacuugcagggaacaugagcucaaucacuauugcucacuaagcacagggucacacuggagucaucuuagggaggcugcgaggaagaaaagggagugcacagagccaugaagcaacuacuuuaaauucugaaucuugcuguguucccacugagcaugcugccuuccuagagcaggccuuggagccaucccagggacuaacacagauccuuccuggggcgcaggcuucucacacuagcguagggugccuaggucauccucaucauuguuuaucaucacagacuucuuucugccugccagauaucuucccuacuuguggcuuuaaaacaccagcaggagggaagucaaggaauguucuuguuaguauaaauccauagcaaaaacgauuugagaacuggaugcuucccaggguuggcagguguguggaugguucccugaauucuuuauccacaggaugcuugaauggguggugcuguugaggcugacaaaugucugagcuuuacagacuuguucauguuuuugagaaccuauggggauacucauugggcagaaucagagcccagcagaacacggggacggggaaggguaaagaggggaaaccgacagaguccugaggucaucccgggaggaagggggacuacuuccagaagcagcagcacaaagggcucugccgagacucugcggaggggguccaggguacuggggguggagggguccccucuugcagugugggguuacuguuuggguaaagcgaagucccaggcaguuuccugugcacauuuccacauggccugcaugaggcgagugaaacccaugucuuugggcuuuuccaggccucucaucagccguugcuucaugauggaaacaaauuccuuauugcucaguucgccauugccaucacagucaaagagugcaaacaccacaucacacacguggucugagagcuccacuuuagccacuguccuggccaccugcugcauggucacuuuaucaagagaugcuccagccauaugguaaaaacucaaugcaguguccacaucauuaauguucuuuaggaaaguaaagaaguucuccaccuccugaaaugucagacccuuuccuucuuugaagugcuucuugagcugccucugcauggcggucagcuucuuggacugcaccccacuguaggcaaguagcaugccaccaaacugccucucaguaauucucccauccacagggucauggcguucaaacauggagcacuucgccaguacuuccuccuggaaucucaggaauccuuccugaaccucaacuucauugaggaaaaaggcaaggaagugagugaagggcugcuuucuucgaaaaguguccaaaagaacaucaauccguguucgggcugaaauuacaccauuucgaugcuggccagugauuacaauuuccccgucuuguccagguuuaggaaugcuaauagaaguuuuggucuccauuucuauuuucuuccuaguguccccucucuuuccaacuauaugcuuauagagcaagcugggggcccucaaaguagaccggaauccuuguggggucugcuccaccucguaggcaucacagggcucaucagcacacuccauggagccuugauagaaguccucuucaucuucuucauguugauaggucuguucuuggacuggauucuuccuguaauuccggccaucaauucuuauaagcuguggacgcagaacuuccaugacacuuucuccaaaugauauuccaauuaugcccgugagggaagccgaggcccugaaucaucaaagagaaggagaagaggacuaggcggcugcagguaaaccaagguagggcgaggaggaggacccggaauuccucuacgcgagcgcguucucugcuccccuccucgcgucuccgccccggccacgcccaccacggcacgggcgcgcgcacgccgccuucgccgcuggcuccgucuguuggggggcgaacacgccgcgguccucgucguggugagcgcagccacucaggcugguccugggggugggg

SEQ ID NO: 2304 - RNA, 2298 nt, Homo sapiens
uaaaggagacagggaacuuuggggauguuuauugcaaaugguuauaauuuaagugauauuuacaauuguuuaagacagagggcaaacaggcucugagccaggccucagcuuuagaggcccauccuggagaggaaauggcacuugcagggaacaugagcucaaucacuauugcucacuaagcacagggucacacuggagucaucuuagggaggcugcgaggaagaaaagggagugcacagagccaugaagcaacuacuuuaaauucugaaucuugcuguguucccacugagcaugcugccuuccuagagcaggccuuggagccaucccagggacuaacacagauccuuccuggggcgcaggcuucucacacuagcguagggugccuaggucauccucaucauuguuuaucaucacagacuucuuucugccugccagauaucuucccuacuuguggcuuuaaaacaccagcaggagggaagucaaggaauguucuuguuaguauaaauccauagcaaaaacgauuugagaacuggaugcuucccaggguuggcagguguguggaugguucccugaauucuuuauccacaggaugcuugaauggguggugcuguugaggcugacaaaugucugagcuuuacagacuuguucauguuuuugagaaccuauggggauacucauugggcagaaucagagcccagcagaacacggggacggggaaggguaaagaggggaaaccgacagaguccugaggucaucccgggaggaagggggacuacuuccagaagcagcagcacaaagggcucugccgagacucugcggaggggguccaggguacuggggguggagggguccccucuugcagugugggguuacuguuuggguaaagcgaagucccaggcaguuuccugugcacauuuccacauggccugcaugaggcgagugaaacccaugucuuugggcuuuuccaggccucucaucagccguugcuucaugauggaaacaaauuccuuauugcucaguucgccauugccaucacagucaaagagugcaaacaccacaucacacacguggucugagagcuccacuuuagccacuguccuggccaccugcugcauggucacauuggggucuuuccugaauaguguauucauaacuguagcaugcaguuucacacuauuccacucuuucacuauuaguccagaugccugaaaacguuccagcacucgaucaacuaauucuuguagccuguuggagccaucuuucauauggacuuuggcguaaagaacauccaccaugccaggaucaucauucauguauucuaucccugccaucuccacuucuagggguuuacccccagaaauaucauuaaugaauuccucuuuacacugcuguagcaucucacaugucugcuggaucucuuccucacucaaaagcaccaacaucccaauaguuagaugaagcuuuuuaggauucuggaaaaugcugcugucaaccccaugauccauggagcacuucgccaguacuuccuccuggaaucucaggaauccuuccugaaccucaacuucauugaggaaaaaggcaaggaagugagugaagggcugcuuucuucgaaaaguguccaaaagaacaucaauccguguucgggcugaaauuacaccauuucgaugcuggccagugauuacaauuuccccgucuuguccagguuuaggaaugcuaauagaaguuuuggucuccauuucuauuuucuuccuaguguccccucucuuuccaacuauaugcuuauagagcaagcugggggcccucaaaguagaccggaauccuuguggggucugcuccaccucguaggcaucacagggcucaucagcacacuccauggagccuugauagaaguccucuucaucuucuucauguugauaggucuguucuuggacuggauucuuccuguaauuccggccaucaauucuuauaagcuguggacgcagaacuuccaugacacuuucuccaaaugauauuccaauuaugcccgugagggaagccgaggcccugaaucaucaaagagaaggagaagaggacuaggcggcugcagguaaaccaagguagggcgaggaggaggacccggaauuccucuacgcgagcgcguucucugcuccccuccucgcgucuccgccccggccacgcccaccacggcacgggcgcgcgcacgccgccuucgccgcuggcuccgucuguuggggggcgaacacgccgcgguccucgucguggugagcgcagccacucaggcugguccugggggugggg

SEQ ID NO: 2305 - RNA, 2338 nt, Homo sapiens
uaaaggagacagggaacuuuggggauguuuauugcaaaugguuauaauuuaagugauauuuacaauuguuuaagacagagggcaaacaggcucugagccaggccucagcuuuagaggcccauccuggagaggaaauggcacuugcagggaacaugagcucaaucacuauugcucacuaagcacagggucacacuggagucaucuuagggaggcugcgaggaagaaaagggagugcacagagccaugaagcaacuacuuuaaauucugaaucuugcuguguucccacugagcaugcugccuuccuagagcaggccuuggagccaucccagggacuaacacagauccuuccuggggcgcaggcuucucacacuagcguagggugccuaggucauccucaucauuguuuaucaucacagacuucuuucugccugccagauaucuucccuacuuguggcuuuaaaacaccagcaggagggaagucaaggaauguucuuguuaguauaaauccauagcaaaaacgauuugagaacuggaugcuucccaggguuggcagguguguggaugguucccugaauucuuuauccacaggaugcuugaauggguggugcuguugaggcugacaaaugucugagcuuuacagacuuguucauguuuuugagaaccuauggggauacucauugggcagaaucagagcccagcagaacacggggacggggaaggguaaagaggggaaaccgacagaguccugaggucaucccgggaggaagggggacuacuuccagaagcagcagcacaaagggcucugccgagacucugcggaggggguccaggguacuggggguggagggguccccucuugcagugugggguuacuguuuggguaaagcgaagucccaggcaguuuccugugcacauuuccacauggccugcaugaggcgagugaaacccaugucuuugggcuuuuccaggccucucaucagccguugcuucaugauggaaacaaauuccuuauugcucaguucgccauugccaucacagucaaagagugcaaacaccacaucacacacguggucugagagcuccacuuuagccacuguccuggccaccugcugcauggucacauuggggucuuuccugaauaguguauucauaacuguagcaugcaguuucacacuauuccacucuuucacuauuaguccagaugccugaaaacguuccagcacucgaucaacuaauucuuguagccuguuggagccaucuuucauauggacuuuggcguaaagaacauccaccaugccaggaucaucauucauguauucuaucccugccaucuccacuucuagggguuuacccccagaaauaucauuaaugaauuccucuuuacacugcuguagcaucucacaugucugcuggaucucuuccucacucaaaagcaccaacaucccaauaguuagaugaagcuuuuuaggauucuggaaaaugcugcugucaaccccaugauccauggagcacuucgccaguacuuccuccuggaaucucaggaauccuuccugaaccucaacuucauugaggaaaaaggcaaggaagugagugaagggcugcuuucuucgaaaaguguccaaaagaacaucaauccguguucgggcugaaauuacaccauuucgaugcuggccagugauuacaauuuccccgucuuguccagguuuaggaaugcuaauagaaguuuuggucuccauuucuauuuucuuccuaguguccccucucuuuccaacuauaugcuuauagagcaagcugggggcccucaaaguagaccggaauccuuguggggucugcuccaccucguaggcaucacagggcucaucagcacacuccauggagccuugauagaaguccucuucaucuucuucauguugauaggucuguucuuggacuggauucuuccuguaauuccggccaucaauucuuauaagcuguggacgcagaacuuccaugacacuuucuccaaaugauauuccaauuaugcccugacagggccaagucccaggauacuucaucaucaguauuuguuugacaaaauuuuacugggcaccuccggugggccuggcaaacugguugaagauagaguugugcgaauagaucugcacaaugagaaagaaaaaaauccauaaugauccaauacucaugacacagcgcuucucuaucuccugcaugaccuuugcugagcugcucgcccugcguucugucguuuguucaucauucauucauccgaaaugcucgggacuggaagcacaguggaaacacugccccagguucugugcucggcauugaggguagaaag

SEQ ID NO: 2306 - RNA, 2203 nt, Homo sapiens
uaaaggagacagggaacuuuggggauguuuauugcaaaugguuauaauuuaagugauauuuacaauuguuuaagacagagggcaaacaggcucugagccaggccucagcuuuagaggcccauccuggagaggaaauggcacuugcagggaacaugagcucaaucacuauugcucacuaagcacagggucacacuggagucaucuuagggaggcugcgaggaagaaaagggagugcacagagccaugaagcaacuacuuuaaauucugaaucuugcuguguucccacugagcaugcugccuuccuagagcaggccuuggagccaucccagggacuaacacagauccuuccuggggcgcaggcuucucacacuagcguagggugccuaggucauccucaucauuguuuaucaucacagacuucuuucugccugccagauaucuucccuacuuguggcuuuaaaacaccagcaggagggaagucaaggaauguucuuguuaguauaaauccauagcaaaaacgauuugagaacuggaugcuucccaggguuggcagguguguggaugguucccugaauucuuuauccacaggaugcuugaauggguggugcuguugaggcugacaaaugucugagcuuuacagacuuguucauguuuuugagaaccuauggggauacucauugggcagaaucagagcccagcagaacacggggacggggaaggguaaagaggggaaaccgacagaguccugaggucaucccgggaggaagggggacuacuuccagaagcagcagcacaaagggcucugccgagacucugcggaggggguccaggguacuggggguggagggguccccucuugcagugugggguuacuguuuggguaaagcgaagucccaggcaguuuccugugcacauuuccacauggccugcaugaggcgagugaaacccaugucuuugggcuuuuccaggccucucaucagccguugcuucaugauggaaacaaauuccuuauugcucaguucgccauugccaucacagucaaagagugcaaacaccacaucacacacguggucugagagcuccacuuuagccacuguccuggccaccugcugcauggucacuuuaucaagagaugcuccagccauaugguaaaaacucaaugcaguguccacaucauuaauguucuuuaggaaaguaaagaaguucuccaccuccugaaaugucagacccuuuccuucuuugaagugcuucuugagcugccucugcauggcggucagcuucuuggacugcaccccacuguaggcaaguagcaugccaccaaacugccucucaguaauucucccauccacagggucauggcguucaaacauggagcacuucgccaguacuuccuccuggaaucucaggaauccuuccugaaccucaacuucauugaggaaaaaggcaaggaagugagugaagggcugcuuucuucgaaaaguguccaaaagaacaucaauccguguucgggcugaaauuacaccauuucgaugcuggccagugauuacaauuuccccgucuuguccagguuuaggaaugcuaauagaaguuuuggucuccauuucuauuuucuuccuaguguccccucucuuuccaacuauaugcuuauagagcaagcugggggcccucaaaguagaccggaauccuuguggggucugcuccaccucguaggcaucacagggcucaucagcacacuccauggagccuugauagaaguccucuucaucuucuucauguugauaggucuguucuuggacuggauucuuccuguaauuccggccaucaauucuuauaagcuguggacgcagaacuuccaugacacuuucuccaaaugauauuccaauuaugcccugacagggccaagucccaggauacuucaucaucaguauuuguuugacaaaauuuuacugggcaccuccggugggccuggcaaacugguugaagauagaguugugcgaauagaucugcacaaugagaaagaaaaaaauccauaaugauccaauacucaugacacagcgcuucucuaucuccugcaugaccuuugcugagcugcucgcccugcguucugucguuuguucaucauucauucauccgaaaugcucgggacuggaagcacaguggaaacacugccccagguucugugcucggcauugaggguagaaag

SEQ ID NO: 2307 - RNA, 2065 nt, Homo sapiens
uaaaggagacagggaacuuuggggauguuuauugcaaaugguuauaauuuaagugauauuuacaauuguuuaagacagagggcaaacaggcucugagccaggccucagcuuuagaggcccauccuggagaggaaauggcacuugcagggaacaugagcucaaucacuauugcucacuaagcacagggucacacuggagucaucuuagggaggcugcgaggaagaaaagggagugcacagagccaugaagcaacuacuuuaaauucugaaucuugcuguguucccacugagcaugcugccuuccuagagcaggccuuggagccaucccagggacuaacacagauccuuccuggggcgcaggcuucucacacuagcguagggugccuaggucauccucaucauuguuuaucaucacagacuucuuucugccugccagauaucuucccuacuuguggcuuuaaaacaccagcaggagggaagucaaggaauguucuuguuaguauaaauccauagcaaaaacgauuugagaacuggaugcuucccaggguuggcagguguguggaugguucccugaauucuuuauccacaggaugcuugaauggguggugcuguugaggcugacaaaugucugagcuuuacagacuuguucauguuuuugagaaccuauggggauacucauugggcagaaucagagcccagcagaacacggggacggggaaggguaaagaggggaaaccgacagaguccugaggucaucccgggaggaagggggacuacuuccagaagcagcagcacaaagggcucugccgagacucugcggaggggguccaggguacuggggguggagggguccccucuugcagugugggguuacuguuuggguaaagcgaagucccaggcaguuuccugugcacauuuccacauggccugcaugaggcgagugaaacccaugucuuugggcuuuuccaggccucucaucagccguugcuucaugauggaaacaaauuccuuauugcucaguucgccauugccaucacagucaaagagugcaaacaccacaucacacacguggucugagagcuccacuuuagccacuguccuggccaccugcugcauggucacuuuaucaagagaugcuccagccauaugguaaaaacucaaugcaguguccacaucauuaauguucuuuaggaaaguaaagaaguucuccaccuccugaaaugucagacccauggagcacuucgccaguacuuccuccuggaaucucaggaauccuuccugaaccucaacuucauugaggaaaaaggcaaggaagugagugaagggcugcuuucuucgaaaaguguccaaaagaacaucaauccguguucgggcugaaauuacaccauuucgaugcuggccagugauuacaauuuccccgucuuguccagguuuaggaaugcuaauagaaguuuuggucuccauuucuauuuucuuccuaguguccccucucuuuccaacuauaugcuuauagagcaagcugggggcccucaaaguagaccggaauccuuguggggucugcuccaccucguaggcaucacagggcucaucagcacacuccauggagccuugauagaaguccucuucaucuucuucauguugauaggucuguucuuggacuggauucuuccuguaauuccggccaucaauucuuauaagcuguggacgcagaacuuccaugacacuuucuccaaaugauauuccaauuaugcccugacagggccaagucccaggauacuucaucaucaguauuuguuugacaaaauuuuacugggcaccuccggugggccuggcaaacugguugaagauagaguugugcgaauagaucugcacaaugagaaagaaaaaaauccauaaugauccaauacucaugacacagcgcuucucuaucuccugcaugaccuuugcugagcugcucgcccugcguucugucguuuguucaucauucauucauccgaaaugcucgggacuggaagcacaguggaaacacugccccagguucugugcucggcauugaggguagaaag

SEQ ID NO: 2308 - RNA, 1779 nt, Homo sapiens
uaaaggagacagggaacuuuggggauguuuauugcaaaugguuauaauuuaagugauauuuacaauuguuuaagacagagggcaaacaggcucugagccaggccucagcuuuagaggcccauccuggagaggaaauggcacuugcagggaacaugagcucaaucacuauugcucacuaagcacagggucacacuggagucaucuuagggaggcugcgaggaagaaaagggagugcacagagccaugaagcaacuacuuuaaauucugaaucuugcuguguucccacugagcaugcugccuuccuagagcaggccuuggagccaucccagggacuaacacagauccuuccuggggcgcaggcuucucacacuagcguagggugccuaggucauccucaucauuguuuaucaucacagacuucuuucugccugccagauaucuucccuacuuguggcuuuaaaacaccagcaggagggaagucaaggaauguucuuguuaguauaaauccauagcaaaaacgauuugagaacuggaugcuucccaggguuggcagguguguggaugguucccugaauucuuuauccacaggaugcuugaauggguggugcuguugaggcugacaaaugucugagcuuuacagacuuguucauguuuuugagaaccuauggggauacucauugggcagaaucagagcccagcagaacacggggacggggaaggguaaagaggggaaaccgacagaguccugaggucaucccgggaggaagggggacuacuuccagaagcagcagcacaaagggcucugccgagacucugcggaggggguccaggguacuggggguggagggguccccucuugcagugugggguuacuguuuggguaaagcgaagucccaggcaguuuccugugcacauuuccacauggccugcaugaggcgagugaaacccaugucuuugggcuuuuccaggccucucaucagccguugcuucaugauggaaacaaauuccuuauugcucaguucgccauugccaucacagucaaagagugcaaacaccacaucacacacguggucugagagcuccacuuuagccacuguccuggccaccugcugcauggucacauuggggucuuuccugaauaguguauucauaacuguagcaugcaguuucacacuauuccacucuuucacuauuaguccagaugccugaaaacguuccagcacucgaucaacuaauucuuguagccuguuggagccaucuuucauauggacuuuggcguaaagaacauccaccaugccaggaucaucauucauguauucuaucccugccaucuccacuucuagggguuuacccccagaaauaucauuaaugaauuccucuuuacacugcuguagcaucucacaugucugcuggaucucuuccucacucaaaagcaccaacaucccaauaguuagaugaagcuuuuuaggauucuggaaaaugcugcugucaaccccaugauccauggagcacuucgccaguacuuccuccuggaaucucaggaauccuuccugaaccucaacuucauugaggaaaaaggcaaggaagugagugaagggcugcuuucuucgaaaaguguccaaaagaacaucaauccguguucgggcugaaauuacaccauuucgaugcuggccagugauuacaauuuccccgucuuguccagguuuaggaaugcuaauagaaguuuuggucuccauuucuauuuucuuccuaguguccccucucuuuccaacuauaugc

SEQ ID NO: 2309 - RNA, 2208 nt, Homo sapiens
uaaaggagacagggaacuuuggggauguuuauugcaaaugguuauaauuuaagugauauuuacaauuguuuaagacagagggcaaacaggcucugagccaggccucagcuuuagaggcccauccuggagaggaaauggcacuugcagggaacaugagcucaaucacuauugcucacuaagcacagggucacacuggagucaucuuagggaggcugcgaggaagaaaagggagugcacagagccaugaagcaacuacuuuaaauucugaaucuugcuguguucccacugagcaugcugccuuccuagagcaggccuuggagccaucccagggacuaacacagauccuuccuggggcgcaggcuucucacacuagcguagggugccuaggucauccucaucauuguuuaucaucacagacuucuuucugccugccagauaucuucccuacuuguggcuuuaaaacaccagcaggagggaagucaaggaauguucuuguuaguauaaauccauagcaaaaacgauuugagaacuggaugcuucccaggguuggcagguguguggaugguucccugaauucuuuauccacaggaugcuugaauggguggugcuguugaggcugacaaaugucugagcuuuacagacuuguucauguuuuugagaaccuauggggauacucauugggcagaaucagagcccagcagaacacggggacggggaaggguaaagaggggaaaccgacagaguccugaggucaucccgggaggaagggggacuacuuccagaagcagcagcacaaagggcucugccgagacucugcggaggggguccaggguacuggggguggagggguccccucuugcagugugggguuacuguuuggguaaagcgaagucccaggcaguuuccugugcacauuuccacauggccugcaugaggcgagugaaacccaugucuuugggcuuuuccaggccucucaucagccguugcuucaugauggaaacaaauuccuuauugcucaguucgccauugccaucacagucaaagagugcaaacaccacaucacacacguggucugagagcuccacuuuagccacuguccuggccaccugcugcauggucacuuuaucaagagaugcuccagccauaugguaaaaacucaaugcaguguccacaucauuaauguucuuuaggaaaguaaagaaguucuccaccuccugaaaugucagacccuuuccuucuuugaagugcuucuugagcugccucugcauggcggucagcuucuuggacugcaccccacuguaggcaaguagcaugccaccaaacugccucucaguaauucucccauccacagggucauggcguucaaacauggagcacuucgccaguacuuccuccuggaaucucaggaauccuuccugaaccucaacuucauugaggaaaaaggcaaggaagugagugaagggcugcuuucuucgaaaaguguccaaaagaacaucaauccguguucgggcugaaauuacaccauuucgaugcuggccagugauuacaauuuccccgucuuguccagguuuaggaaugcuaauagaaguuuuggucuccauuucuauuuucuuccuaguguccccucucuuuccaacuauaugccuggacuuccaaguauaaauauucugacaauccaaaguuaucuucuggaacccacagucguuugauguguucaagugaaugagauuauagagcaagcugggggcccucaaaguagaccggaauccuuguggggucugcuccaccucguaggcaucacagggcucaucagcacacuccauggagccuugauagaaguccucuucaucuucuucauguugauaggucuguucuuggacuggauucuuccuguaauuccggccaucaauucuuauaagcuguggacgcagaacuuccaugacacuuucuccaaaugauauuccaauuaugcccugcagggacuagaaaaauggagaagguaggaggagaaacaggagacugcugcagcagacgugcgauaggaaauuuccccaggccggguuugaccgagugcgcaugcgggccgagggcuggcgccugcgcagugggacagcgccgauggcguaguuuccuggggacccagcugggugggaaaaguggcuaggaguuagcuugggagccgcugguguucugagcgcuccccucucu

SEQ ID NO: 2310 - RNA, 1644 nt, Homo sapiens
uaaaggagacagggaacuuuggggauguuuauugcaaaugguuauaauuuaagugauauuuacaauuguuuaagacagagggcaaacaggcucugagccaggccucagcuuuagaggcccauccuggagaggaaauggcacuugcagggaacaugagcucaaucacuauugcucacuaagcacagggucacacuggagucaucuuagggaggcugcgaggaagaaaagggagugcacagagccaugaagcaacuacuuuaaauucugaaucuugcuguguucccacugagcaugcugccuuccuagagcaggccuuggagccaucccagggacuaacacagauccuuccuggggcgcaggcuucucacacuagcguagggugccuaggucauccucaucauuguuuaucaucacagacuucuuucugccugccagauaucuucccuacuuguggcuuuaaaacaccagcaggagggaagucaaggaauguucuuguuaguauaaauccauagcaaaaacgauuugagaacuggaugcuucccaggguuggcagguguguggaugguucccugaauucuuuauccacaggaugcuugaauggguggugcuguugaggcugacaaaugucugagcuuuacagacuuguucauguuuuugagaaccuauggggauacucauugggcagaaucagagcccagcagaacacggggacggggaaggguaaagaggggaaaccgacagaguccugaggucaucccgggaggaagggggacuacuuccagaagcagcagcacaaagggcucugccgagacucugcggaggggguccaggguacuggggguggagggguccccucuugcagugugggguuacuguuuggguaaagcgaagucccaggcaguuuccugugcacauuuccacauggccugcaugaggcgagugaaacccaugucuuugggcuuuuccaggccucucaucagccguugcuucaugauggaaacaaauuccuuauugcucaguucgccauugccaucacagucaaagagugcaaacaccacaucacacacguggucugagagcuccacuuuagccacuguccuggccaccugcugcauggucacuuuaucaagagaugcuccagccauaugguaaaaacucaaugcaguguccacaucauuaauguucuuuaggaaaguaaagaaguucuccaccuccugaaaugucagacccuuuccuucuuugaagugcuucuugagcugccucugcauggcggucagcuucuuggacugcaccccacuguaggcaaguagcaugccaccaaacugccucucaguaauucucccauccacagggucauggcguucaaacauggagcacuucgccaguacuuccuccuggaaucucaggaauccuuccugaaccucaacuucauugaggaaaaaggcaaggaagugagugaagggcugcuuucuucgaaaaguguccaaaagaacaucaauccguguucgggcugaaauuacaccauuucgaugcuggccagugauuacaauuuccccgucuuguccagguuuaggaaugcuaauagaaguuuuggucuccauuucuauuuucuuccuaguguccccucucuuuccaacuauaugc

SEQ ID NO: 2311-2318 - skipped (8 entries)

SEQ ID NO: 2319 - RNA, 668 nt, Homo sapiens
uuaaaagccagauuuuauuucuauuuaaaaacaaugcucaggagacuuaguuccaaagacgaagaugccaggguucaauguacaacuacagcgaggugcuagcgauuauugagugagucauggaaggcucuguaguuccuuggagacuuccgcuuuuucguaucacuccuagucuuagccucgugguuuucugcaaguucucgucgacuguaaccguacacagggcugucacuccagugaggacaacaaaaaaagcaccuauggcuaucauuguuaauccaguagagaaaaccacagagucagagggguccuguagaacaacaaugagucccagaaucacagucgauaacccuaagcaggugacaagcagacauucagagcaagacaagcaucggaacucccgucuucuggauagauucauccauggauaaguuuggauagguugguacauggugauuuuuugcugguacagcaggcaacuuuuuagucaaaauaaggucaggaauaguuuccccaaaacagccagacacccucuguggggacgacgcgccggccggcggcagaaggcaggcggaggcgggcggcggcaggcgggcagcgguggcggcggcggcggcggggccugggugcucgcucgcagcucucccucgguuagcggcggcggcagc

SEQ ID NO: 2320-2339 - skipped (20 entries)

SEQ ID NO: 2340 - RNA, 2382 nt, Homo sapiens
uagaauaguuuuuucucaucaaaacaugauuuauuaauuuuaagcaagaguaagcauaugugauaguggccagcuuggggauagaacucuuccugguugaugcacaguucagcaccuguugggucuuggcuguugggaugauaauucuuuugggugaggggaacagccguggucaaggcugccugcacccccauccaggcacaggacccugggcaaagucucaaaagagguaguguuuuuacuuucgcaccaacaauacaacauaaguauuggguacaaaagaggagauuuccuuccccucuaccucaacgggcaaaaggccuuccaucuucagaagaggcuugugaggaccaucgguugaugaccuccuagugaauucuggcucccauucagagcacagagaaacccacaaaaggggccuguggcucugguuccaggucucaaggguacagcuugguuacauccccaggccccaggcugauucuccugccaucauacugcaagccuuccuguaccacuuugacccagguugaggucuggcggaaaauaaccucaaaggcaauuaauacaaaaagcuuccuguaagcuaagagggguuaucaacuauauguacuuauuuuuccagagauugaagagagaagagaacgagccaaggcuugguuuuguuuuauguugguggcacauguagacacuuuggcauaacgaaccccauagagccugcagcccaauccacucuguuuugguuuagaaugaaguuuuuuuuuuaauuauuuuucuuggaaguagggaggauuugaaagcuugaaaaucaagaaucaaaagacagugaaucuagaaggcaucugggagcagaacagagauugaagacgggugggcacaggagaaagcgccaccaucgaucccggcugcugcccuggaaaugugauuuucuuaauagcugaguucaugguugcuugaggucaggccuggcuauucauuuccagcgaugucugaccagagaggacucaucauugacgaccucagggucacgggggcgacgcugacaccggaacggcagcagcagcaggacgauuaagacaaggaggauggcuccacagacgcucaugagcgcauaggacacaauccacaaaaugggcucgcucaaagacugagcggggacacaguugcuggcuacauccucuguugagaaaggcccggaaauuucagacacugcagcaccugcaauuucugcacaggggcucgcugcgaagcccacccucuucugggcucugucgaagaugacguagaagcccuccaucaccguggcaccgaucaccagcgcauuuguggauggggaaaugccgaaucgguaacauucauaauucaggccggcccccaucaugggcugaauguaaagcagagaugcgcgggccacagcuuccaccaccgcaucaaacaccuucuggggcaggcgcagcagcguggugccacuguccacgauggccuugucugcguuauacucucugcaguccagauuaaggcuuuggccuccaauuuccaauuucagaauuucuaucugguaguaccacucuuccuuaauagggguauaccagaugucuccuuuauacaaacuugguucaauuccacccaagacaagacuaccuccguuggucccagauccagcaacgggcaagccggcuccacacaucugcauggagaaaacguuggggauguuugcuugugucaccagggagucgaagaaggucuccagagaacuugauggcuuuucucucugaauuucggaagggaguuccaagccuuuugcugcaauaaauacccagcuagaccugaauuucauguuccugauuucuuuacuuccaagugcuucuauggcauucuuggcaucguuauucagucuugugcuuccgucgucauaggucaccaugaagagcagggauuuuggagcagcacucugaauaaacuuugucaucgguccagaguuaucaccuucauacauaucaaaacaucguguugcugucacauucccaguuacauaguugacaauggcaauguuuauuccucuggcaacauuucccagcuguucucccauaaguagguuauccucaaagcagauuuuggcguacuugcuucugccaccuccgcugaguaaccuguaggcauaggugucagaugggcagggaguccaguggucacauuuuugccuuuuggggacuggagcaccagccaaugggcgcaucuuccaggugccgcuccccuccuggcccuggcggcagcucccaggcgaccgcagccagcggagccccugggucaggaaggcaaggggcgggcagcggucgugucgggcaggggcgggccagcugggugcgcggccagucgggcaaa

SEQ ID NO: 2341 - RNA, 2363 nt, Homo sapiens
uagaauaguuuuuucucaucaaaacaugauuuauuaauuuuaagcaagaguaagcauaugugauaguggccagcuuggggauagaacucuuccugguugaugcacaguucagcaccuguugggucuuggcuguugggaugauaauucuuuugggugaggggaacagccguggucaaggcugccugcacccccauccaggcacaggacccugggcaaagucucaaaagagguaguguuuuuacuuucgcaccaacaauacaacauaaguauuggguacaaaagaggagauuuccuuccccucuaccucaacgggcaaaaggccuuccaucuucagaagaggcuugugaggaccaucgguugaugaccuccuagugaauucuggcucccauucagagcacagagaaacccacaaaaggggccuguggcucugguuccaggucucaaggguacagcuugguuacauccccaggccccaggcugauucuccugccaucauacugcaagccuuccuguaccacuuugacccagguugaggucuggcggaaaauaaccucaaaggcaauuaauacaaaaagcuuccuguaagcuaagagggguuaucaacuauauguacuuauuuuuccagagauugaagagagaagagaacgagccaaggcuugguuuuguuuuauguugguggcacauguagacacuuuggcauaacgaaccccauagagccugcagcccaauccacucuguuuugguuuagaaugaaguuuuuuuuuuaauuauuuuucuuggaaguagggaggauuugaaagcuugaaaaucaagaaucaaaagacagugaaucuagaaggcaucugggagcagaacagagauugaagacgggugggcacaggagaaagcgccaccaucgaucccggcugcugcccuggaaaugugauuuucuuaauagcugaguucaugguugcuugaggucaggccuggcuauucauuuccagcgaugucugaccagagaggacucaucauugacgaccucagggucacgggggcgacgcugacaccggaacggcagcagcagcaggacgauuaagacaaggaggauggcuccacagacgcucaugagcgcauaggacacaauccacaaaaugggcucgcucaaagacugagcggggacacaguugcuggcuacauccucuguugagaaaggcccggaaauuucagacacugcagcaccugcaauuucugaggcaggauugugauacggaaugaccugcuggaguucucgucucucagguagauggagauuuuagggaaguaagaccaagguguuuccgaauucguccagcacgccagcugggacccaguccagaaaccaucagagaauucuggaaucagagaugcgcgggccacagcuuccaccaccgcaucaaacaccuucuggggcaggcgcagcagcguggugccacuguccacgauggccuugucugcguuauacucucugcaguccagauuaaggcuuuggccuccaauuuccaauuucagaauuucuaucugguaguaccacucuuccuuaauagggguauaccagaugucuccuuuauacaaacuugguucaauuccacccaagacaagacuaccuccguuggucccagauccagcaacgggcaagccggcuccacacaucugcauggagaaaacguuggggauguuugcuugugucaccagggagucgaagaaggucuccagagaacuugauggcuuuucucucugaauuucggaagggaguuccaagccuuuugcugcaauaaauacccagcuagaccugaauuucauguuccugauuucuuuacuuccaagugcuucuauggcauucuuggcaucguuauucagucuugugcuuccgucgucauaggucaccaugaagagcagggauuuuggagcagcacucugaauaaacuuugucaucgguccagaguuaucaccuucauacauaucaaaacaucguguugcugucacauucccaguuacauaguugacaauggcaauguuuauuccucuggcaacauuucccagcuguucucccauaaguagguuauccucaaagcagauuuuggcguacuugcuucugccaccuccgcugaguaaccuguaggcauaggugucagaugggcagggaguccaguggucacauuuuugccuuuuggggacuggagcaccagccaaugggcgcaucuuccaggugccgcuccccuccuggcccuggcggcagcucccaggcgaccgcagccagcggagccccugggucaggaaggcaaggggcgggcagcggucgugucgggcaggggcgggccagcugggugcgcggccagucgggcaaa

SEQ ID NO: 2342 - RNA, 2532 nt, Homo sapiens
uagaauaguuuuuucucaucaaaacaugauuuauuaauuuuaagcaagaguaagcauaugugauaguggccagcuuggggauagaacucuuccugguugaugcacaguucagcaccuguugggucuuggcuguugggaugauaauucuuuugggugaggggaacagccguggucaaggcugccugcacccccauccaggcacaggacccugggcaaagucucaaaagagguaguguuuuuacuuucgcaccaacaauacaacauaaguauuggguacaaaagaggagauuuccuuccccucuaccucaacgggcaaaaggccuuccaucuucagaagaggcuugugaggaccaucgguugaugaccuccuagugaauucuggcucccauucagagcacagagaaacccacaaaaggggccuguggcucugguuccaggucucaaggguacagcuugguuacauccccaggccccaggcugauucuccugccaucauacugcaagccuuccuguaccacuuugacccagguugaggucuggcggaaaauaaccucaaaggcaauuaauacaaaaagcuuccuguaagcuaagagggguuaucaacuauauguacuuauuuuuccagagauugaagagagaagagaacgagccaaggcuugguuuuguuuuauguugguggcacauguagacacuuuggcauaacgaaccccauagagccugcagcccaauccacucuguuuugguuuagaaugaaguuuuuuuuuuaauuauuuuucuuggaaguagggaggauuugaaagcuugaaaaucaagaaucaaaagacagugaaucuagaaggcaucugggagcagaacagagauugaagacgggugggcacaggagaaagcgccaccaucgaucccggcugcugcccuggaaaugugauuuucuuaauagcugaguucaugguugcuugaggucaggccuggcuauucauuuccagcgaugucugaccagagaggacucaucauugacgaccucagggucacgggggcgacgcugacaccggaacggcagcagcagcaggacgauuaagacaaggaggauggcuccacagacgcucaugagcgcauaggacacaauccacaaaaugggcucgcucaaagacugagcggggacacaguugcuggcuacauccucuguugagaaaggcccggaaauuucagacacugcagcaccugcaauuucugcacaggggcucgcugcgaagcccacccucuucugggcucugucgaagaugacguagaagcccuccaucaccguggcaccgaucaccagcgcauuuguggauggggaaaugccgaaucgguaacauucauaauucaggccggcccccaucaugggcugaauguaaagcugaggcaggauugugauacggaaugaccugcuggaguucucgucucucagguagauggagauuuuagggaaguaagaccaagguguuuccgaauucguccagcacgccagcugggacccaguccagaaaccaucagagaauucuggaaucagagaugcgcgggccacagcuuccaccaccgcaucaaacaccuucuggggcaggcgcagcagcguggugccacuguccacgauggccuugucugcguuauacucucugcaguccagauuaaggcuuuggccuccaauuuccaauuucagaauuucuaucugguaguaccacucuuccuuaauagggguauaccagaugucuccuuuauacaaacuugguucaauuccacccaagacaagacuaccuccguuggucccagauccagcaacgggcaagccggcuccacacaucugcauggagaaaacguuggggauguuugcuugugucaccagggagucgaagaaggucuccagagaacuugauggcuuuucucucugaauuucggaagggaguuccaagccuuuugcugcaauaaauacccagcuagaccugaauuucauguuccugauuucuuuacuuccaagugcuucuauggcauucuuggcaucguuauucagucuugugcuuccgucgucauaggucaccaugaagagcagggauuuuggagcagcacucugaauaaacuuugucaucgguccagaguuaucaccuucauacauaucaaaacaucguguugcugucacauucccaguuacauaguugacaauggcaauguuuauuccucuggcaacauuucccagcuguucucccauaaguagguuauccucaaagcagauuuuggcguacuugcuucugccaccuccgcugaguaaccuguaggcauaggugucagaugggcagggaguccaguggucacauuuuugccuuuuggggacuggagcaccagccaaugggcgcaucuuccaggugccgcuccccuccuggcccuggcggcagcucccaggcgaccgcagccagcggagccccugggucaggaaggcaaggggcgggcagcggucgugucgggcaggggcgggccagcugggugcgcggccagucgggcaaa

SEQ ID NO: 2343 - RNA, 2676 nt, Homo sapiens
uagaauaguuuuuucucaucaaaacaugauuuauuaauuuuaagcaagaguaagcauaugugauaguggccagcuuggggauagaacucuuccugguugaugcacaguucagcaccuguugggucuuggcuguugggaugauaauucuuuugggugaggggaacagccguggucaaggcugccugcacccccauccaggcacaggacccugggcaaagucucaaaagagguaguguuuuuacuuucgcaccaacaauacaacauaaguauuggguacaaaagaggagauuuccuuccccucuaccucaacgggcaaaaggccuuccaucuucagaagaggcuugugaggaccaucgguugaugaccuccuagugaauucuggcucccauucagagcacagagaaacccacaaaaggggccuguggcucugguuccaggucucaaggguacagcuugguuacauccccaggccccaggcugauucuccugccaucauacugcaagccuuccuguaccacuuugacccagguugaggucuggcggaaaauaaccucaaaggcaauuaauacaaaaagcuuccuguaagcuaagagggguuaucaacuauauguacuuauuuuuccagagauugaagagagaagagaacgagccaaggcuugguuuuguuuuauguugguggcacauguagacacuuuggcauaacgaaccccauagagccugcagcccaauccacucuguuuugguuuagaaugaaguuuuuuuuuuaauuauuuuucuuggaaguagggaggauuugaaagcuugaaaaucaagaaucaaaagacagugaaucuagaaggcaucugggagcagaacagagauugaagacgggugggcacaggagaaagcgccaccaucgaucccggcugcugcccuggaaaugugauuuucuuaauagcugaguucaugguugcuugaggucaggccuggcuauucauuuccagcgaugucugaccagagaggacucaucauugacgaccucagggucacgggggcgacgcugacaccggaacggcagcagcagcaggacgauuaagacaaggaggauggcuccacagacgcucaugagcgcauaggacacaauccacaaaaugggcucgcucaaagacugagcggggacacaguugcuggcuacauccucuguugagaaaggcccggaaauuucagacacugcagcaccugcaauuucugcacaggggcucgcugcgaagcccacccucuucugggcucugucgaagaugacguagaagcccuccaucaccguggcaccgaucaccagcgcauuuguggauggggaaaugccgaaucgguaacauucauaauucaggccggcccccaucaugggcugaauguaaagcugaggcaggauugugauacggaaugaccugcuggaguucucgucucucagguagauggagauuuuagggaaguaagaccaagguguuuccgaauucguccagcacgccagcugggacccaguccagaaaccaucagagaauucuggaaucagagaugcgcgggccacagcuuccaccaccgcaucaaacaccuucuggggcaggcgcagcagcguggugccacuguccacgauggccuugucugcguuauacucucugcaguccagauuaaggcuuuggccuccaauuuccaauuucagaauuucuaucugguaguaccacucuuccuuaauagggguauaccagaugucuccuuuauacaaacuugguucaauuccacccaagacaagacuaccuccguuggucccagauccagcaacgggcaagccggcuccacacaucugcauggagaaaacguuggggauguuugcuugugucaccagggagucgaagaaggucuccagagaacuugauggcuuuucucucugaauuucggaagggaguuccaagccuuuugcugcaauaaauacccagcuagaccugaauuucauguuccugauuucuuuacuuccaagugcuucuauggcauucuuggcaucguuauucagucuugugcuuccgucgucauaggucaccaugaagagcagggauuuuggagcagcacucugaauaaacuuugucaucgguccagaguuaucaccuucauacauaucaaaacaucguguugcugucacauucccaguuacauaguugacaauggcaauguuuauuccucuggcaacauuucccagcuguucucccauaaguagguuauccucaaagcagauuuuggcguacuugcuucugccaccuccgcugaguaaccuguaggcauaggugucagaugggcagggaguccaguggucacauuuuugccuuuuggggacuggagcuuugaggacaggccucuccccgaugcugcggaugcuauaggcagcacuggacaggggugcaucuggaaugagcucugcgagcagguaccccgaauaccaggcacacaaggaggcgaagaccacgaacaccaccuugagcaggccaccagccaaugggcgcaucuuccaggugccgcuccccuccuggcccuggcggcagcucccaggcgaccgcagccagcggagccccugggucaggaaggcaaggggcgggcagcggucgugucgggcaggggcgggccagcugggugcgcggccagucgggcaaa

SEQ ID NO: 2344 - RNA, 1536 nt, Homo sapiens
uagaauaguuuuuucucaucaaaacaugauuuauuaauuuuaagcaagaguaagcauaugugauaguggccagcuuggggauagaacucuuccugguugaugcacaguucagcaccuguugggucuuggcuguugggaugauaauucuuuugggugaggggaacagccguggucaaggcugccugcacccccauccaggcacaggacccugggcaaagucucaaaagagguaguguuuuuacuuucgcaccaacaauacaacauaaguauuggguacaaaagaggagauuuccuuccccucuaccucaacgggcaaaaggccuuccaucuucagaagaggcuugugaggaccaucgguugaugaccuccuagugaauucuggcucccauucagagcacagagaaacccacaaaaggggccuguggcucugguuccaggucucaaggguacagcuugguuacauccccaggccccaggcugauucuccugccaucauacugcaagccuuccuguaccacuuugacccagguugaggucuggcggaaaauaaccucaaaggcaauuaauacaaaaagcuuccuguaagcuaagagggguuaucaacuauauguacuuauuuuuccagagauugaagagagaagagaacgagccaaggcuugguuuuguuuuauguugguggcacauguagacacuuuggcauaacgaaccccauagagccugcagcccaauccacucuguuuugguuuagaaugaaguuuuuuuuuuaauuauuuuucuuggaaguagggaggauuugaaagcuugaaaaucaagaaucaaaagacagugaaucuagaaggcaucugggagcagaacagagauugaagacgggugggcacaggagaaagcgccaccaucgaucccggcugcugcccuggaaaugugauuuucuuaauagcugaguucaugguugcuugaggucaggccuggcuauucauuuccagcgaugucugaccagagaggacucaucauugacgaccucagggucacgggggcgacgcugacaccggaacggcagcagcagcaggacgauuaagacaaggaggauggcuccacagacgcucaugagcgcauaggacacaauccacaaaaugggcucgcucaaagacugagcggggacacaguugcuggcuacauccucuguugagaaaggcccggaaauuucagacacugcagcaccugcaauuucuuugaggacaggccucuccccgaugcugcggaugcuauaggcagcacuggacaggggugcaucuggaaugagcucugcgagcagguaccccgaauaccaggcacacaaggaggcgaagaccacgaacaccaccuugagcaggccaccagccaaugggcgcaucuuccaggugccgcuccccuccuggcccuggcggcagcucccaggcgaccgcagccagcggagccccugggucaggaaggcaaggggcgggcagcggucgugucgggcaggggcgggccagcugggugcgcggccagucgggcaaa

SEQ ID NO: 2345 - RNA, 2507 nt, Homo sapiens
uagaauaguuuuuucucaucaaaacaugauuuauuaauuuuaagcaagaguaagcauaugugauaguggccagcuuggggauagaacucuuccugguugaugcacaguucagcaccuguugggucuuggcuguugggaugauaauucuuuugggugaggggaacagccguggucaaggcugccugcacccccauccaggcacaggacccugggcaaagucucaaaagagguaguguuuuuacuuucgcaccaacaauacaacauaaguauuggguacaaaagaggagauuuccuuccccucuaccucaacgggcaaaaggccuuccaucuucagaagaggcuugugaggaccaucgguugaugaccuccuagugaauucuggcucccauucagagcacagagaaacccacaaaaggggccuguggcucugguuccaggucucaaggguacagcuugguuacauccccaggccccaggcugauucuccugccaucauacugcaagccuuccuguaccacuuugacccagguugaggucuggcggaaaauaaccucaaaggcaauuaauacaaaaagcuuccuguaagcuaagagggguuaucaacuauauguacuuauuuuuccagagauugaagagagaagagaacgagccaaggcuugguuuuguuuuauguugguggcacauguagacacuuuggcauaacgaaccccauagagccugcagcccaauccacucuguuuugguuuagaaugaaguuuuuuuuuuaauuauuuuucuuggaaguagggaggauuugaaagcuugaaaaucaagaaucaaaagacagugaaucuagaaggcaucugggagcagaacagagauugaagacgggugggcacaggagaaagcgccaccaucgaucccggcugcugcccuggaaaugugauuuucuuaauagcugaguucaugguugcuugaggucaggccuggcuauucauuuccagcgaugucugaccagagaggacucaucauugacgaccucagggucacgggggcgacgcugacaccggaacggcagcagcagcaggacgauuaagacaaggaggauggcuccacagacgcucaugagcgcauaggacacaauccacaaaaugggcucgcucaaagacugagcggggacacaguugcuggcuacauccucuguugagaaaggcccggaaauuucagacacugcagcaccugcaauuucugaggcaggauugugauacggaaugaccugcuggaguucucgucucucagguagauggagauuuuagggaaguaagaccaagguguuuccgaauucguccagcacgccagcugggacccaguccagaaaccaucagagaauucuggaaucagagaugcgcgggccacagcuuccaccaccgcaucaaacaccuucuggggcaggcgcagcagcguggugccacuguccacgauggccuugucugcguuauacucucugcaguccagauuaaggcuuuggccuccaauuuccaauuucagaauuucuaucugguaguaccacucuuccuuaauagggguauaccagaugucuccuuuauacaaacuugguucaauuccacccaagacaagacuaccuccguuggucccagauccagcaacgggcaagccggcuccacacaucugcauggagaaaacguuggggauguuugcuugugucaccagggagucgaagaaggucuccagagaacuugauggcuuuucucucugaauuucggaagggaguuccaagccuuuugcugcaauaaauacccagcuagaccugaauuucauguuccugauuucuuuacuuccaagugcuucuauggcauucuuggcaucguuauucagucuugugcuuccgucgucauaggucaccaugaagagcagggauuuuggagcagcacucugaauaaacuuugucaucgguccagaguuaucaccuucauacauaucaaaacaucguguugcugucacauucccaguuacauaguugacaauggcaauguuuauuccucuggcaacauuucccagcuguucucccauaaguagguuauccucaaagcagauuuuggcguacuugcuucugccaccuccgcugaguaaccuguaggcauaggugucagaugggcagggaguccaguggucacauuuuugccuuuuggggacuggagcuuugaggacaggccucuccccgaugcugcggaugcuauaggcagcacuggacaggggugcaucuggaaugagcucugcgagcagguaccccgaauaccaggcacacaaggaggcgaagaccacgaacaccaccuugagcaggccaccagccaaugggcgcaucuuccaggugccgcuccccuccuggcccuggcggcagcucccaggcgaccgcagccagcggagccccugggucaggaaggcaaggggcgggcagcggucgugucgggcaggggcgggccagcugggugcgcggccagucgggcaaa

SEQ ID NO: 2346 - RNA, 1432 nt, Homo sapiens
uagaauaguuuuuucucaucaaaacaugauuuauuaauuuuaagcaagaguaagcauaugugauaguggccagcuuggggauagaacucuuccugguugaugcacaguucagcaccuguugggucuuggcuguugggaugauaauucuuuugggugaggggaacagccguggucaaggcugccugcacccccauccaggcacaggacccugggcaaagucucaaaagagguaguguuuuuacuuucgcaccaacaauacaacauaaguauuggguacaaaagaggagauuuccuuccccucuaccucaacgggcaaaaggccuuccaucuucagaagaggcuugugaggaccaucgguugaugaccuccuagugaauucuggcucccauucagagcacagagaaacccacaaaaggggccuguggcucugguuccaggucucaaggguacagcuugguuacauccccaggccccaggcugauucuccugccaucauacugcaagccuuccuguaccacuuugacccagguugaggucuggcggaaaauaaccucaaaggcaauuaauacaaaaagcuuccuguaagcuaagagggguuaucaacuauauguacuuauuuuuccagagauugaagagagaagagaacgagccaaggcuugguuuuguuuuauguugguggcacauguagacacuuuggcauaacgaaccccauagagccugcagcccaauccacucuguuuugguuuagaaugaaguuuuuuuuuuaauuauuuuucuuggaaguagggaggauuugaaagcuugaaaaucaagaaucaaaagacagugaaucuagaaggcaucugggagcagaacagagauugaagacgggugggcacaggagaaagcgccaccaucgaucccggcugcugcccuggaaaugugauuuucuuaauagcugaguucaugguugcuugaggucaggccuggcuauucauuuccagcgaugucugaccagagaggacucaucauugacgaccucagggucacgggggcgacgcugacaccggaacggcagcagcagcaggacgauuaagacaaggaggauggcuccacagacgcucaugagcgcauaggacacaauccacaaaaugggcucgcucaaagacugagcggggacacaguugcuggcuacauccucuguugagaaaggcccggaaauuucagacacugcagcaccugcaauuucuuugaggacaggccucuccccgaugcugcggaugcuauaggcagcacuggacaggggugcaucuggaaugagcucugcgagcagguaccccgaauaccaggcacacaaggaggcgaagaccacgaacaccaccuugagcaggcccagucucgggcuccugccuucgcacgguggaaaaagauggcgccagggugccccagccau

SEQ ID NO: 2347 - RNA, 2526 nt, Homo sapiens
uagaauaguuuuuucucaucaaaacaugauuuauuaauuuuaagcaagaguaagcauaugugauaguggccagcuuggggauagaacucuuccugguugaugcacaguucagcaccuguugggucuuggcuguugggaugauaauucuuuugggugaggggaacagccguggucaaggcugccugcacccccauccaggcacaggacccugggcaaagucucaaaagagguaguguuuuuacuuucgcaccaacaauacaacauaaguauuggguacaaaagaggagauuuccuuccccucuaccucaacgggcaaaaggccuuccaucuucagaagaggcuugugaggaccaucgguugaugaccuccuagugaauucuggcucccauucagagcacagagaaacccacaaaaggggccuguggcucugguuccaggucucaaggguacagcuugguuacauccccaggccccaggcugauucuccugccaucauacugcaagccuuccuguaccacuuugacccagguugaggucuggcggaaaauaaccucaaaggcaauuaauacaaaaagcuuccuguaagcuaagagggguuaucaacuauauguacuuauuuuuccagagauugaagagagaagagaacgagccaaggcuugguuuuguuuuauguugguggcacauguagacacuuuggcauaacgaaccccauagagccugcagcccaauccacucuguuuugguuuagaaugaaguuuuuuuuuuaauuauuuuucuuggaaguagggaggauuugaaagcuugaaaaucaagaaucaaaagacagugaaucuagaaggcaucugggagcagaacagagauugaagacgggugggcacaggagaaagcgccaccaucgaucccggcugcugcccuggaaaugugauuuucuuaauagcugaguucaugguugcuugaggucaggccuggcuauucauuuccagcgaugucugaccagagaggacucaucauugacgaccucagggucacgggggcgacgcugacaccggaacggcagcagcagcaggacgauuaagacaaggaggauggcuccacagacgcucaugagcgcauaggacacaauccacaaaaugggcucgcucaaagacugagcggggacacaguugcuggcuacauccucuguugagaaaggcccggaaauuucagacacugcagcaccugcaauuucugcacaggggcucgcugcgaagcccacccucuucugggcucugucgaagaugacguagaagcccuccaucaccguggcaccgaucaccagcgcauuuguggauggggaaaugccgaaucgguaacauucauaauucaggccggcccccaucaugggcugaauguaaagcagagaugcgcgggccacagcuuccaccaccgcaucaaacaccuucuggggcaggcgcagcagcguggugccacuguccacgauggccuugucugcguuauacucucugcaguccagauuaaggcuuuggccuccaauuuccaauuucagaauuucuaucugguaguaccacucuuccuuaauagggguauaccagaugucuccuuuauacaaacuugguucaauuccacccaagacaagacuaccuccguuggucccagauccagcaacgggcaagccggcuccacacaucugcauggagaaaacguuggggauguuugcuugugucaccagggagucgaagaaggucuccagagaacuugauggcuuuucucucugaauuucggaagggaguuccaagccuuuugcugcaauaaauacccagcuagaccugaauuucauguuccugauuucuuuacuuccaagugcuucuauggcauucuuggcaucguuauucagucuugugcuuccgucgucauaggucaccaugaagagcagggauuuuggagcagcacucugaauaaacuuugucaucgguccagaguuaucaccuucauacauaucaaaacaucguguugcugucacauucccaguuacauaguugacaauggcaauguuuauuccucuggcaacauuucccagcuguucucccauaaguagguuauccucaaagcagauuuuggcguacuugcuucugccaccuccgcugaguaaccuguaggcauaggugucagaugggcagggaguccaguggucacauuuuugccuuuuggggacuggagcuuugaggacaggccucuccccgaugcugcggaugcuauaggcagcacuggacaggggugcaucuggaaugagcucugcgagcagguaccccgaauaccaggcacacaaggaggcgaagaccacgaacaccaccuugagcaggccaccagccaaugggcgcaucuuccaggugccgcuccccuccuggcccuggcggcagcucccaggcgaccgcagccagcggagccccugggucaggaaggcaaggggcgggcagcggucgugucgggcaggggcgggccagcugggugcgcggccagucgggcaaa

SEQ ID NO: 2348 - RNA, 950 nt, Homo sapiens
uugggauuuugcaacauuuaaucaaaaaagaaucuggcaucuuaaaaguuagguuuacaaacuugacacauucucaauauuagcaauuuaucuauuuaaacauugucuaagaaaauaugaucuaugaagacauuaauacauuaauaagauacuuaagaguucauuauaagcuacaacacuuugcaaauaaguauccaguuuaauuguaacaaaccacaauuugugagcaaauuuaagaauauaaaaaacauuaauuaguuaaauacaauucucugggaauauacauuauaccuacagcuguuuuuacagugagagucuuccuuuuuuuuuccuuuuaauuaucaaaaugguaaaucacuguaugguccuggaucuccaugcuauaaaacugaaauauguauuuccagcguagcagauggugaccaggaaggcaaagaacgaugaggccgcccagcuguugaaguugugacugucccucucaggggagacggaagaugcaucuacaacagcggcagagagguacaagacgaaggcacugccguuaaagcacaggcccauuugcgccacuuucagcagggccgcgugggugcggggguagcugagguccagcagccccuccaaggggcucgcgcugggcugggccgcgccggccccggguccgagcgcgcugccgcugcugcacguggugcggacgagcccggcuccgugcgacauugcgcggccccagcucgcuggccgccuccccgggcagcugcccaggggccagauacagagggcgggccgggggcgggcgggggcgggcgcuggcgagggcggggcgcccgggucccugccccgcugcuggagacgcggagccgccucuggcgggaucccuccggugacuggccggccggcgccuuccagaaagguagcggcagucccggcccucguagaugcgcggaaguuagacu

SEQ ID NO: 2349 - RNA, 1124 nt, Homo sapiens
uugggauuuugcaacauuuaaucaaaaaagaaucuggcaucuuaaaaguuagguuuacaaacuugacacauucucaauauuagcaauuuaucuauuuaaacauugucuaagaaaauaugaucuaugaagacauuaauacauuaauaagauacuuaagaguucauuauaagcuacaacacuuugcaaauaaguauccaguuuaauuguaacaaaccacaauuugugagcaaauuuaagaauauaaaaaacauuaauuaguuaaauacaauucucugggaauauacauuauaccuacagcuguuuuuacagugagagucuuccuuuuuuuuuccuuuuaauuaucaaaaugguaaaucacuguaugguccuggaucuccaugcuauaaaacugaaauauguauuuccagcguagcagauggugaccaggaaggcaaagaacgaugaggccgcccagcuguugaaguugugacugucccucucaggggagacggaagaugcaucuacaacagcggcagagagguacaagacgaaggcacugccguuaaagcacaggcccgacaggggccagcugauacaggugagcacgcgguagaagcggaagagguggaccagguaaaaggcgaggaucauuaucaagucgcaaauggugaccacuucaaaguagcuguaggcgcuguaguugguccacagggagcuccgcacacagaugaaggcaaucagcagggugaccauuugcgccacuuucagcagggccgcgugggugcggggguagcugagguccagcagccccuccaaggggcucgcgcugggcugggccgcgccggccccggguccgagcgcgcugccgcugcugcacguggugcggacgagcccggcuccgugcgacauugcgcggccccagcucgcuggccgccuccccgggcagcugcccaggggccagauacagagggcgggccgggggcgggcgggggcgggcgcuggcgagggcggggcgcccgggucccugccccgcugcuggagacgcggagccgccucuggcgggaucccuccggugacuggccggccggcgccuuccagaaagguagcggcagucccggcccucguagaugcgcggaaguuagacu

SEQ ID NO: 2350 - RNA, 1298 nt, Homo sapiens
uugggauuuugcaacauuuaaucaaaaaagaaucuggcaucuuaaaaguuagguuuacaaacuugacacauucucaauauuagcaauuuaucuauuuaaacauugucuaagaaaauaugaucuaugaagacauuaauacauuaauaagauacuuaagaguucauuauaagcuacaacacuuugcaaauaaguauccaguuuaauuguaacaaaccacaauuugugagcaaauuuaagaauauaaaaaacauuaauuaguuaaauacaauucucugggaauauacauuauaccuacagcuguuuuuacagugagagucuuccuuuuuuuuuccuuuuaauuaucaaaaugguaaaucacuguaugguccuggaucuccaugcuauaaaacugaaauauguauuuccagcguagcagauggugaccaggaaggcaaagaacgaugaggccgcccagcuguugaaguugugacugucccucucaggggagacggaagaugcaucuacaacagcggcagagagguacaagacgaaggcacugccguuaaagcacaggcccacuguuguccagggcaccuggggaauccugguguaggucauuguuauguagauaaugaggaagaagacggugaggacccaguaaaauacagcuacaaacaugacccagccaaaugcggggacccggaaguacucaguuccagcaauaagcguccauaccagcagccccagaaccgacaggggccagcugauacaggugagcacgcgguagaagcggaagagguggaccagguaaaaggcgaggaucauuaucaagucgcaaauggugaccacuucaaaguagcuguaggcgcuguaguugguccacagggagcuccgcacacagaugaaggcaaucagcagggugaccauuugcgccacuuucagcagggccgcgugggugcggggguagcugagguccagcagccccuccaaggggcucgcgcugggcugggccgcgccggccccggguccgagcgcgcugccgcugcugcacguggugcggacgagcccggcuccgugcgacauugcgcggccccagcucgcuggccgccuccccgggcagcugcccaggggccagauacagagggcgggccgggggcgggcgggggcgggcgcuggcgagggcggggcgcccgggucccugccccgcugcuggagacgcggagccgccucuggcgggaucccuccggugacuggccggccggcgccuuccagaaagguagcggcagucccggcccucguagaugcgcggaaguuagacu

SEQ ID NO: 2351 - RNA, 1007 nt, Homo sapiens
uugggauuuugcaacauuuaaucaaaaaagaaucuggcaucuuaaaaguuagguuuacaaacuugacacauucucaauauuagcaauuuaucuauuuaaacauugucuaagaaaauaugaucuaugaagacauuaauacauuaauaagauacuuaagaguucauuauaagcuacaacacuuugcaaauaaguauccaguuuaauuguaacaaaccacaauuugugagcaaauuuaagaauauaaaaaacauuaauuaguuaaauacaauucucugggaauauacauuauaccuacagcuguuuuuacagugagagucuuccuuuuuuuuuccuuuuaauuaucaaaaugguaaaucacuguaugguccuggaucuccaugcuauaaaacugaaauauguauuuccagcguagcagauggugaccaggaaggcaaagaacgacaggggccagcugauacaggugagcacgcgguagaagcggaagagguggaccagguaaaaggcgaggaucauuaucaagucgcaaauggugaccacuucaaaguagcuguaggcgcuguaguugguccacagggagcuccgcacacagaugaaggcaaucagcagggugaccauuugcgccacuuucagcagggccgcgugggugcggggguagcugagguccagcagccccuccaaggggcucgcgcugggcugggccgcgccggccccggguccgagcgcgcugccgcugcugcacguggugcggacgagcccggcuccgugcgacauugcgcggccccagcucgcuggccgccuccccgggcagcugcccaggggccagauacagagggcgggccgggggcgggcgggggcgggcgcuggcgagggcggggcgcccgggucccugccccgcugcuggagacgcggagccgccucuggcgggaucccuccggugacuggccggccggcgccuuccagaaagguagcggcagucccggcccucguagaugcgcggaaguuagacu

SEQ ID NO: 2352 - RNA, 1461 nt, Homo sapiens
ugcuggcucgcaggacgcgaguguagagaugcggcuggcucuccuuuccucuucuagucugucuaccuugcccugugcuggcuucugggacugcgcugucccacugcgcagccuggcaucuuggaaggcguccccugccccggccccacacggacuucaguccuccccaggcaccacugccucuggacacacugacacacacgccuacggccgcagcccucauggaacgaagcccaaguugcgacagacagaggcugagaaagucagggggacagccuagggucuucugcacccaggagguccagggcugcaaagccacauaggguuggcccaaggcugagaagccucagggggugacgaggacgggccagugcaccuccuucccgcccagcccuccacaccauccccuuuggacgcgaggcugcuccuuugcugagggcuacggucggaucuccccacaggaggagacagagagcgagacagccggagagccgucacacgcaggacccaccuugaagaugaggcagucgccugggugcucggcguacagcgaggucagccgguacugguucuccguggugaugucgaucugguagccggugagcguguagcaggccuugcggaacuccuggaucuuggucuggaaaaccuccuugagccgcugguucuucagcucggcacucuccaccugcuucuucagcucugccaccuccuuggacgauggcagacucgcggcggcagccucaaggucggcugggacggugccuccucucuccauggcgcgcaggagcccgcgcagucgcucgcacuccgccugcagcuggcugugguccucgcgcaggcgcugccuggccacacuggugggguucaggcucaugugcagcacuuugguccugcucuggucauagucacccugcagagcucgccgcuccagcugugccuccagcauccucuuuuccuccuccagccgacuccgcucgccuuccagcuccucgaccuucaaccugagcguguccgccuccucccuggagaacaggaagcucuguucggcagagcuggacugagacuucagcaucuucagcuccaucuccagcaugucugcucuuuguuucuggccucccagcuccuccagggccugcgacagcugagccuccaucucggcgcuguggcugugcaccuucugcaccauauccucagccucccgcaugcgccgcgucagcuggggugaguacucggccggggucagcucgcugucguaggaccccaggauggcccgcauaccgucccgcuccuuggagccggcuccuucgccacuuggugcagccucagggcccagcaguggccccucugcugacgccuucuucagcuuuuuguucuuuuucucugucacuucaggaacuuuucucuucuguuuugccauccuaagcgugaacagcugcgucgcggacgccgccuuccggc

SEQ ID NO: 2353 - RNA, 1054 nt, Homo sapiens
gguggaggagaggaggcggagggcugaccuuuugaucuugauaauccuauagcuuuccgcacagcuuguggcugagugcggcuuccuugaagaugaggcagucgccugggugcucggcguacagcgaggucagccgguacugguucuccguggugaugucgaucugguagccggugagcguguagcaggccuugcggaacuccuggaucuuggucuggaaaaccuccuugagccgcugguucuucagcucggcacucuccaccugcuucuucagcucugccaccuccuuggacgauggcagacucgcggcggcagccucaaggucggcugggacggugccuccucucuccauggcgcgcaggagcccgcgcagucgcucgcacuccgccugcagcuggcugugguccucgcgcaggcgcugccuggccacacuggugggguucaggcucaugugcagcacuuugguccugcucuggucauagucacccugcagagcucgccgcuccagcugugccuccagcauccucuuuuccuccuccagccgacuccgcucgccuuccagcuccucgaccuucaaccugagcguguccgccuccucccuggagaacaggaagcucuguucggcagagcuggacugagacuucagcaucuucagcuccaucuccagcaugucugcucuuuguuucuggccucccagcuccuccagggccugcgacagcugagccuccaucucggcgcuguggcugugcaccuucugcaccauauccucagccucccgcaugcgccgcgucagcuggggugaguacucggccggggucagcucgcugucguaggaccccaggauggcccgcauaccgucccgcuccuuggagccggcuccuucgccacuuggugcagccucagggcccagcaguggccccucugcugacgccuucuucagcuuuuuguucuuuuucucugucacuucaggaacuuuucucuucuguuuugccauccugcgcccacgucgcccaccuaagcgugaacagcugcgucgcggacgccgccuuccggc

SEQ ID NO: 2354 - RNA, 636 nt, Homo sapiens
gugucuaggggagaagauuuuauuucacaaggugaggaacccaggcugguggccgacgcccacacaccaggcuccgggacgcauggggucugcacguggagagggugcuggccgccccagcaggaagcccgacguaggucccagcgugucugucagucaugcugcugcccuguggggcuggagaggcaggacgugcacccagccuguggcuggcggggcaggggaccugcaggucaggccaagcagaguggcuccggcuaugcccccgagccugcaggcuacgccacggucuggcggcugaagagcucgagggugagcgagcugaggaaggcagggaugcuguccuggcgccgcaggugcaccucgaugagcucgcccacggugugugagaacucugucuccaguagcugcaucuuggaacccgaggggcugguggccuuggagccggcuccuucgccacuuggugcagccucagggcccagcaguggccccucugcugacgccuucuucagcuuuuuguucuuuuucucugucacuucaggaacuuuucucuucuguuuugccauccugcgcccaccugcgcccacgucgcccaccuaagcgugaacagcugcgucgcggacgccgccuuccggc

SEQ ID NO: 2355 - RNA, 1416 nt, Homo sapiens
gugucuaggggagaagauuuuauuucacaaggugaggaacccaggcugguggccgacgcccacacaccaggcuccgggacgcauggggucugcacguggagagggugcuggccgccccagcaggaagcccgacguaggucccagcgugucugucagucaugcugcugcccuguggggcuggagaggcaggacgugcacccagccuguggcuggcggggcaggggaccugcaggucaggccaagcagaguggcuccggcuaugcccccgagccugcaggcuacgccacggucuggcggcugaagagcucgagggugagcgagcugaggaaggcagggaugcuguccuggcgccgcaggugcaccucgaugagcucgcccacggugugugagaacucugucuccaguagcugcaucuuggaacccgaggggcugguggccuugaagaugaggcagucgccugggugcucggcguacagcgaggucagccgguacugguucuccguggugaugucgaucugguagccggugagcguguagcaggccuugcggaacuccuggaucuuggucuggaaaaccuccuugagccgcugguucuucagcucggcacucuccaccugcuucuucagcucugccaccuccuuggacgauggcagacucgcggcggcagccucaaggucggcugggacggugccuccucucuccauggcgcgcaggagcccgcgcagucgcucgcacuccgccugcagcuggcugugguccucgcgcaggcgcugccuggccacacuggugggguucaggcucaugugcagcacuuugguccugcucuggucauagucacccugcagagcucgccgcuccagcugugccuccagcauccucuuuuccuccuccagccgacuccgcucgccuuccagcuccucgaccuucaaccugagcguguccgccuccucccuggagaacaggaagcucuguucggcagagcuggacugagacuucagcaucuucagcuccaucuccagcaugucugcucuuuguuucuggccucccagcuccuccagggccugcgacagcugagccuccaucucggcgcuguggcugugcaccuucugcaccauauccucagccucccgcaugcgccgcgucagcuggggugaguacucggccggggucagcucgcugucguaggaccccaggauggcccgcauaccgucccgcuccuuggagccggcuccuucgccacuuggugcagccucagggcccagcaguggccccucugcugacgccuucuucagcuuuuuguucuuuuucucugucacuucaggaacuuuucucuucuguuuugccauccugcgcccaccugcgcccacgucgcccaccuaagcgugaacagcugcgucgcggacgccgccuuccggc

SEQ ID NO: 2356 - RNA, 2410 nt, Homo sapiens
uugaucuucuugcggaguccucuuuuucuuuuucuucuucuucccccagcaacuuggcucagagucuuugcugggagacucuuuuccuaguaagucauccaauucguucagucccaguaaccgggccuggggcaccuccagcuccagccgauaggacagguuccucagggugcacacgcaguucuccaccgucuugcugucguaaucggauguguucacacacguguggaucacauacaacagugagucuaccagccccucgcaggaccgcauuugcuuccgagcuucuucccccgcggagcugagguuccuuaggcaaccugucguguuacgcagaacuagugaagucugaaauuuaauuuuaugaucaucaucaaaagaagaguuauuccauccagaauguggaacaaucacaguguuuguuaagguugagagagcaucucgaaugauugucauuuuuacagcaucacaugaggauaaauuccaaagaacuccuguaacaagcucccuuacuucugcaucaauagauuuucucaacagucgcaacaaggcagguaucccaccaacauucuucauugcuauuuuauuuucaucuguagacuugccaaaaacgagguuucgaagggcaccacaagcauucuucugaacuuccaaaacucugugguccagaaggucaaccagaugcuugauucccccuaaccuacacaccuccaucuucacuuuguugucaccaaagcacaggugcugcagguaggccgcugcauuugccugaacagaugggaacuggugcugaagcaugugaaugaccucaggcaacucaggaucacgccaggcaaacucccugggguccuucugaaugcugucuauugauggggaucuuguggugccaucaucagccggcacugcaugcugaagccuguuauaauugcacucuugcacucgguauuguauaggccuguagggcuccgcguagguagcuguuguguucagagcauaauuauuucuuugguauguaaggguacuucguuggcuggauguccuuuguagauuuccaauaccuacugaaccugugcgauacaacgccgucugcgauccuuggagcuccacaguuccaugguuugggcugcgguacacugggcuguaauagguccuccccucauauauaggaguaaugugcaagucgggagacacggcagaacgaaggucuugcccaagcugacuaugcugacuagcauaggaacuccguaagccugucaggcugucuggccuggguggaaccauccucucauaaaugucauacugcugcuguccgaauugcuccaugucaugaacaguccuuugcagugaaggucccagaugcugugguacggcggucaucccugagcguuugggggacgacgaccccaccuggccuugggauggggaagcuacucgagucugugcauccgucagggucaguggggaccccacucuggcggugguuugguauugagggguugguccguugggauuggaggucugccgggaggugacugacccaauccgccguauagcuguuggggaggcgggucucugugaguacggagaggcugcccgugcagcagguaaugugguggaggaauaugcacugggguucagaggucgggggucggucacugacggagagccaaauccacuacccagagaaguucucagagacccccuugaaggagacacgccugugcugaaccaguguuuguccuucagcucuugaauuccucaccacaugguuguuaguugauccuaugaaugaaugcugcugucuguugucugccuugcucacguucuggcuguuguggaaacucccugcuuccugguauccacugucggaauaagaauucauuuguguugaacuucuugaguuacccaaugaucccucacuuucauggagagaugucuguucuggugaauagaggguuccuuguucuggcucuguccugaugagauaguuguugggcuggacagcgucagaaacucuagguuugcuuacaccaguauuuggcacgucuguugaucuccaaggaaaugacuucucaguugagcuggugcuggcgaugcuuggugauucugcuccaagccuacaucuuucuagcugacuggcaacaaucugccuuuccacuuccaguucucgggugagucgcugaaacugaagcuccugcuccuucacggaugcuagaauagugguggcuguggucucggguuccaugccugggccaguggaggcagcuuccuggcgggucugugguugccccuccuccaccaaugaggccugcucaggagcuggcauuccuccuguuucuccccacaaugugucggugccauugacuucuacuucauguuccuucuccauccccagcaagcacuggaccac

SEQ ID NO: 2357 - skipped

SEQ ID NO: 2358 - RNA, 4334 nt, Homo sapiens
uuccaaggaugaaauuuccacauuuauuuuucuuuuaugugaauagaaaauggcagugaaguguccuaugaaugaggcgaggaaugggcauggcgcugcgguaccagccuggacguugugcuuccaaaguacacuaugugugguggagacaaagggugucgcgguuugcuuuuaauugcucacaguuccuugggcuucucauuuguuuuugaaguugucaguuucuucaaaucucuuuucaagugacacauugcauuacaaaugauggcacuuaaccaauguggcauuuccauauuuacaccaacaaaagaaauuuacaagacauaauagcauacaaucuugacauuuaguaauagcaauaaaacaugggcauccauuuuauuuuuucuguacaaacuaucagaacauaacuuuauucacauuaaaaaaaucaucuuuaauuugauuugaccuacauaucccccauuucauuucacccauuucucaaaccucucaucacgucacccacaccuucaccagacuacagaaucuauaaguaauuagaucuaacaccuaaauagagcuuagaaaguccucucccaaacauuuccucacuucccugauaauuccucaaaaaagaaaaaaaaaacacacuucauucauuccuuccacuucacuuucacauuucaaucaucaaaucagcaagauggacuuuucaccucaaucugaacaagguuagaaagaaagaguuccucuguugggcaucuugaugcuacacccaugagucuggggacccuggguacuguucugcucuauaagaaggucguuuaguggaauaaaagucuacauaauuuguggucgauuucaguccauacuguguugaguaaucaguagaagcuggaaagugaacucggucaucaaaauaaggaucuucauagcuaugaggagacugcaaauacaaucuguaugcaucaaaguucuuucuguuggagucaucuugacuauaauacagcuguugaugcuguagccgucuauuuuguucucuugcuggugaggaauaggaacugauguaaauuggugaagguuugcuggagccaggguacaggccuuuauguguggcauccccuuggcuauuguaauacugcauagguggcuggguccuaucguauucagagcgagggucucugauuccuaacagugcuggugaggaagaggugcugccgacugacugaaugaugggugacaucuguugguuggugguagacaaggaaggaugugauuugaaucggucucgcuccaaugucgacacagguguaauaaaaugguucugauuccacccauccuuuuuauaaaugcuccggaggucccgauauugccauaauguauucaagaccugggcugcugccuucaccacuuucagagaugaucugucgccccugccuuugguuauguucaccagcuucucuaugccuccugagucggccagggcuuuugcguucuccauguuuuugcuggugaccucgugcagagcacagcagauggcugccauggucucaucagacaagacacuggggccauugccgccggggagccgguugaccaggucucgcauggcguauuugccuaugagcuccuuguugcgaacaucuagugccauauuccucaaggcuguugccacggaagaaacaacucuaucguuauccauucucagaagcuccacaaggauggggagccccuuuucuuuucggacggccgcccggauauaugcugcaaacuuccaguugccagcagagagguucuggagagacccugcagagccuuccaagguggcuggguuggaacuuucugcuagaagagucagauaugguuuuaccaccgaugggugccacagcaucucaaccccuuugggggacuucgacaguccugggauaggaccaacuccaucccauugaucuucuugcggaguccucuuuuucuuuuucuucuucuucccccagcaacuuggcucagagucuuugcugggagacucuuuuccuaguaagucauccaauucguucagucccaguaaccgggccuggggcaccuccagcuccagccgauaggacagguuccucagggugcacacgcaguucuccaccgucuugcugucguaaucggauguguucacacacguguggaucacauacaacagugagucuaccagccccucgcaggaccgcauuugcuuccgagcuucuucccccgcggagcugagguuccuuaggcaaccugucguguuacgcagaacuagugaagucugaaauuuaauuuuaugaucaucaucaaaagaagaguuauuccauccagaauguggaacaaucacaguguuuguuaagguugagagagcaucucgaaugauugucauuuuuacagcaucacaugaggauaaauuccaaagaacuccuguaacaagcucccuuacuucugcaucaauagauuuucucaacagucgcaacaaggcagguaucccaccaacauucuucauugcuauuuuauuuucaucuguagacuugccaaaaacgagguuucgaagggcaccacaagcauucuucugaacuuccaaaacucugugguccagaaggucaaccagaugcuugauucccccuaaccuacacaccuccaucuucacuuuguugucaccaaagcacaggugcugcagguaggccgcugcauuugccugaacagaugggaacuggugcugaagcaugugaaugaccucaggcaacucaggaucacgccaggcaaacucccugggguccuucugaaugcugucuauugauggggaucuuguggugccaucaucagccggcacugcaugcugaagccuguuauaauugcacucuugcacucgguauuguauaggccuguagggcuccgcguagguagcuguuguguucagagcauaauuauuucuuugguauguaaggguacuucguuggcuggauguccuuuguagauuuccaauaccugaaccugugcgauacaacgccgucugcgauccuuggagcuccacaguuccaugguuugggcugcgguacacugggcuguaauagguccuccccucauauauaggaguaaugugcaagucgggagacacggcagaacgaaggucuugcccaagcugacuaugcugacuagcauaggaacuccguaagccugucaggcugucuggccuggguggaaccauccucucauaaaugucauacugcugcuguccgaauugcuccaugucaugaacaguccuuugcagugaaggucccagaugcugugguacggcggucaucccugagcguuugggggacgacgaccccaccuggccuugggauggggaagcuacucgagucugugcauccgucagggucaguggggaccccacucuggcggugguuugguauugagggguugguccguugggauuggaggucugccgggaggugacugacccaauccgccguauagcuguuggggaggcgggucucugugaguacggagaggcugcccgugcagcagguaaugugguggaggaauaugcacugggguucagaggucgggggucggucacugacggagagccaaauccacuacccagagaaguucucagagacccccuugaaggagacacgccugugcugaaccaguguuuguccuucagcucuugaauuccucaccacaugguuguuaguugauccuaugaaugaaugcugcugucuguugucugccuugcucacguucuggcuguuguggaaacucccugcuuccugguauccacugucggaauaagaauucauuuguguugaacuucuugaguuacccaaugaucccucacuuucauggagagaugucuguucuggugaauagaggguuccuuguucuggcucuguccugaugagauaguuguugggcuggacagcgucagaaacucuagguuugcuuacaccaguauuuggcacgucuguugaucuccaaggaaaugacuucucaguugagcuggugcuggcgaugcuuggugauucugcuccaagccuacaucuuucuagcugacuggcaacaaucugccuuuccacuuccaguucucgggugagucgcugaaacugaagcuccugcuccuucacggaugcuagaauagugguggcuguggucucggguuccaugccugggccaguggaggcagcuuccuggcgggucugugguugccccuccuccaccaaugaggccugcucaggagcuggcauuccuccuguuucuccccacaaugugucggugccauugacuucuacuucauguuccuucuccauccccagcaagcacuggaccac

SEQ ID NO: 2359 - RNA, 4414 nt, Homo sapiens
uuccaaggaugaaauuuccacauuuauuuuucuuuuaugugaauagaaaauggcagugaaguguccuaugaaugaggcgaggaaugggcauggcgcugcgguaccagccuggacguugugcuuccaaaguacacuaugugugguggagacaaagggugucgcgguuugcuuuuaauugcucacaguuccuugggcuucucauuuguuuuugaaguugucaguuucuucaaaucucuuuucaagugacacauugcauuacaaaugauggcacuuaaccaauguggcauuuccauauuuacaccaacaaaagaaauuuacaagacauaauagcauacaaucuugacauuuaguaauagcaauaaaacaugggcauccauuuuauuuuuucuguacaaacuaucagaacauaacuuuauucacauuaaaaaaaucaucuuuaauuugauuugaccuacauaucccccauuucauuucacccauuucucaaaccucucaucacgucacccacaccuucaccagacuacagaaucuauaaguaauuagaucuaacaccuaaauagagcuuagaaaguccucucccaaacauuuccucacuucccugauaauuccucaaaaaagaaaaaaaaaacacacuucauucauuccuuccacuucacuuucacauuucaaucaucaaaucagcaagauggacuuuucaccucaaucugaacaagguuagaaagaaagaguuccucuguugggcaucuugaugcuacacccaugagucuggggacccuggguacuguucugcucuauaagaaggucguuuaguggaauaaaagucuacauaauuuguggucgauuucaguccauacuguguugaguaaucaguagaagcuggaaagugaacucggucaucaaaauaaggaucuucauagcuaugaggagacugcaaauacaaucuguaugcaucaaaguucuuucuguuggagucaucuugacuauaauacagcuguugaugcuguagccgucuauuuuguucucuugcuggugaggaauaggaacugauguaaauuggugaagguuugcuggagccaggguacaggccuuuauguguggcauccccuuggcuauuguaauacugcauagguggcuggguccuaucguauucagagcgagggucucugauuccuaacagugcuggugaggaagaggugcugccgacugacugaaugaugggugacaucuguugguuggugguagacaaggaaggaugugauuugaaucggucucgcuccaaugucgacacagguguaauaaaaugguucugauuccacccauccuuuuuauaaaugcuccggaggucccgauauugccauaauguauucaagaccugggcugcugccuucaccacuuucagagaugaucugucgccccugccuuugguuauguucaccagcuucucuaugccuccugagucggccagggcuuuugcguucuccauguuuuugcuggugaccucgugcagagcacagcagauggcugccauggucucaucagacaagacacuggggccauugccgccggggagccgguugaccaggucucgcauggcguauuugccuaugagcuccuuguugcgaacaucuagugccauauuccucaaggcuguugccacggaagaaacaacucuaucguuauccauucucagaagcuccacaaggauggggagccccuuuucuuuucggacggccgcccggauauaugcugcaaacuuccaguugccagcagagagguucuggagagacccugcagagccuuccaagguggcuggguuggaacuuucugcuagaagagucagauaugguuuuaccaccgaugggugccacagcaucucaaccccuuugggggacuucgacaguccugggauaggaccaacuccaucccauugaucuucuugcggaguccucuuuuucuuuuucuucuucuucccccagcaacuuggcucagagucuuugcugggagacucuuuuccuaguaagucauccaauucguucagucccaguaaccgggccuggggcaccuccagcuccagccgauaggacagguuccucagggugcacacgcaguucuccaccgucuugcugucguaaucggauguguucacacacguguggaucacauacaacagugagucuaccagccccucgcaggaccgcauuugcuuccgagcuucuucccccgcggagcugagguuccuuaggcaaccugucguguuacgcagaacuagugaagucugaaauuuaauuuuaugaucaucaucaaaagaagaguuauuccauccagaauguggaacaaucacaguguuuguuaagguugagagagcaucucgaaugauugucauuuuuacagcaucacaugaggauaaauuccaaagaacuccuguaacaagcucccuuacuucugcaucaauagauuuucucaacagucgcaacaaggcagguaucccaccaacauucuucauugcuauuuuauuuucaucuguagacuugccaaaaacgagguuucgaagggcaccacaagcauucuucugaacuuccaaaacucugugguccagaaggucaaccagaugcuugauucccccuaaccuacacaccuccaucuucacuuuguugucaccaaagcacaggugcugcagguaggccgcugcauuugccugaacagaugggaacuggugcugaagcaugugaaugaccucaggcaacucaggaucacgccaggcaaacucccugggguccuucugaaugcugucuauugauggggaucuuguggugccaucaucagccggcacugcaugcugaagccuguuauaauugcacucuugcacucgguauuguauaggccuguagggcuccgcguagguagcuguuguguucagagcauaauuauuucuuugguauguaaggguacuucguuggcuggauguccuuuguagauuuccaauaccuacugaaccugugcgauacaacgccgucugcgauccuuggagcuccacaguuccaugguuugggcugcgguacacugggcuguaauagguccuccccucauauauaggaguaaugugcaagucgggagacacggcagaacgaaggucuugcccaagcugacuaugcugacuagcauaggaacuccguaagccugucaggcugucuggccuggguggaaccauccucucauaaaugucauacugcugcuguccgaauugcuccaugucaugaacaguccuuugcagugaaggucccagaugcugugguacggcggucaucccugagcguuugggggacgacgaccccaccuggccuugggauggggaagcuacucgagucugugcauccgucagggucaguggggaccccacucuggcggugguuugguauugagggguugguccguugggauuggaggucugccgggaggugacugacccaauccgccguauagcuguuggggaggcgggucucugugaguacggagaggcugcccgugcagcagguaaugugguggaggaauaugcacugggguucagaggucgggggucggucacugacggagagccaaauccacuacccagagaaguucucagagacccccuugaaggagacacgccugugcugauaacauaagaaggagacugugcucuagauggaacugaacuaacucuucucauggcccgauuggcuacugauggcugaaccaguguuuguccuucagcucuugaauuccucaccacaugguuguuaguugauccuaugaaugaaugcugcugucuguugucugccuugcucacguucuggcuguuguggaaacucccugcuuccugguauccacugucggaauaagaauucauuuguguugaacuucuugaguuacccaaugaucccucacuuucauggagagaugucuguucuggugaauagaggguuccuuguucuggcucuguccugaugagauaguuguugggcuggacagcgucagaaacucuagguuugcuuacaccaguauuuggcacgucuguugaucuccaaggaaaugacuucucaguugagcuggugcuggcgaugcuuggugauucugcuccaagccuacaucuuucuagcugacuggcaacaaucugccuuuccacuuccaguucucgggugagucgcugaaacugaagcuccugcuccuucacggaugcuagaauagugguggcuguggucucggguuccaugccugggccaguggaggcagcuuccuggcgggucugugguugccccuccuccaccaaugaggccugcucaggagcuggcauuccuccuguuucuccccacaaugugucggugccauugacuucuacuucauguuccuucuccauccccagcaagcacuggaccac

SEQ ID NO: 2360-2362 - skipped (3 entries)

SEQ ID NO: 2363 - RNA, 2171 nt, Homo sapiens
cuuaggcaaccugucguguuacgcagaacuagugaagucugaaauuuaauuuuaugaucaucaucaaaagaagaguuauuccauccagaauguggaacaaucacaguguuuguuaagguugagagagcaucucgaaugauugucauuuuuacagcaucacaugaggauaaauuccaaagaacuccuguaacaagcucccuuacuucugcaucaauagauuuucucaacagucgcaacaaggcagguaucccaccaacauucuucauugcuauuuuauuuucaucuguagacuugccaaaaacgagguuucgaagggcaccacaagcauucuucugaacuuccaaaacucugugguccagaaggucaaccagaugcuugauucccccuaaccuacacaccuccaucuucacuuuguugucaccaaagcacaggugcugcagguaggccgcugcauuugccugaacagaugggaacuggugcugaagcaugugaaugaccucaggcaacucaggaucacgccaggcaaacucccugggguccuucugaaugcugucuauugauggggaucuuguggugccaucaucagccggcacugcaugcugaagccuguuauaauugcacucuugcacucgguauuguauaggccuguagggcuccgcguagguagcuguuguguucagagcauaauuauuucuuugguauguaaggguacuucguuggcuggauguccuuuguagauuuccaauaccuacugaaccugugcgauacaacgccgucugcgauccuuggagcuccacaguuccaugguuugggcugcgguacacugggcuguaauagguccuccccucauauauaggaguaaugugcaagucgggagacacggcagaacgaaggucuugcccaagcugacuaugcugacuagcauaggaacuccguaagccugucaggcugucuggccuggguggaaccauccucucauaaaugucauacugcugcuguccgaauugcuccaugucaugaacaguccuuugcagugaaggucccagaugcugugguacggcggucaucccugagcguuugggggacgacgaccccaccuggccuugggauggggaagcuacucgagucugugcauccgucagggucaguggggaccccacucuggcggugguuugguauugagggguugguccguugggauuggaggucugccgggaggugacugacccaauccgccguauagcuguuggggaggcgggucucugugaguacggagaggcugcccgugcagcagguaaugugguggaggaauaugcacugggguucagaggucgggggucggucacugacggagagccaaauccacuacccagagaaguucucagagacccccuugaaggagacacgccugugcugauaacauaagaaggagacugugcucuagauggaacugaacuaacucuucucauggcccgauuggcuacugauggcugaaccaguguuuguccuucagcucuugaauuccucaccacaugguuguuaguugauccuaugaaugaaugcugcugucuguugucugccuugcucacguucuggcuguuguggaaacucccugcuuccugguauccacugucggaauaagaauucauuuguguugaacuucuugaguuacccaaugaucuuucauggagagaugucuguucuggugaauagaggguuccuuguucuggcucuguccugaugagauaguuguugggcuggacagcgucagaaacucuagguuugcuuacaccaguauuuggcacgucuguugaucuccaaggaaaugacuucucaguugagcuggugcuggcgaugcuuggugauucugcuccaagccuacaucuuucuagcugacuggcaacaaucugccuuuccacuuccaguucucgggugagucgcugaaacugaagcuccugcuccuucacggaugcuagaauagugguggcuguggucucggguuccaugccugggccaguggaggcagcuuccuggcgggucugugguugccccuccuccaccaaugaggccugcucaggagcuggcauuccuccuguuucuccccacaaugugucggugccauugacuucuacuucauguuccuucuccauccccagcaagcacuggaccac

SEQ ID NO: 2364 - RNA, 2909 nt, Homo sapiens
ugauuuuacaagccauauauuuauuaaucaaaagaagaguuucaugaauuuuguagcugcucucacauuuacagcucaucuugucaccagaacauaccuaugagcuccuuguugcgaacaucuagugccauauuccucaaggcuguugccacggaagaaacaacucuaucguuauccauucucagaagcuccacaaggauggggagccccuuuucuuuucggacggccgcccggauauaugcugcaaacuuccaguugccagcagagagguucuggagagacccugcagagccuuccaagguggcuggguuggaacuuucugcuagaagagucagauaugguuuuaccaccgaugggugccacagcaucucaaccccuuugggggacuucgacaguccugggauaggaccaacuccaucccauugaucuucuugcggaguccucuuuuucuuuuucuucuucuucccccagcaacuuggcucagagucuuugcugggagacucuuuuccuaguaagucauccaauucguucagucccaguaaccgggccuggggcaccuccagcuccagccgauaggacagguuccucagggugcacacgcaguucuccaccgucuugcugucguaaucggauguguucacacacguguggaucacauacaacagugagucuaccagccccucgcaggaccgcauuugcuuccgagcuucuucccccgcggagcugagguuccuuaggcaaccugucguguuacgcagaacuagugaagucugaaauuuaauuuuaugaucaucaucaaaagaagaguuauuccauccagaauguggaacaaucacaguguuuguuaagguugagagagcaucucgaaugauugucauuuuuacagcaucacaugaggauaaauuccaaagaacuccuguaacaagcucccuuacuucugcaucaauagauuuucucaacagucgcaacaaggcagguaucccaccaacauucuucauugcuauuuuauuuucaucuguagacuugccaaaaacgagguuucgaagggcaccacaagcauucuucugaacuuccaaaacucugugguccagaaggucaaccagaugcuugauucccccuaaccuacacaccuccaucuucacuuuguugucaccaaagcacaggugcugcagguaggccgcugcauuugccugaacagaugggaacuggugcugaagcaugugaaugaccucaggcaacucaggaucacgccaggcaaacucccugggguccuucugaaugcugucuauugauggggaucuuguggugccaucaucagccggcacugcaugcugaagccuguuauaauugcacucuugcacucgguauuguauaggccuguagggcuccgcguagguagcuguuguguucagagcauaauuauuucuuugguauguaaggguacuucguuggcuggauguccuuuguagauuuccaauaccuacugaaccugugcgauacaacgccgucugcgauccuuggagcuccacaguuccaugguuugggcugcgguacacugggcuguaauagguccuccccucauauauaggaguaaugugcaagucgggagacacggcagaacgaaggucuugcccaagcugacuaugcugacuagcauaggaacuccguaagccugucaggcugucuggccuggguggaaccauccucucauaaaugucauacugcugcuguccgaauugcuccaugucaugaacaguccuuugcagugaaggucccagaugcugugguacggcggucaucccugagcguuugggggacgacgaccccaccuggccuugggauggggaagcuacucgagucugugcauccgucagggucaguggggaccccacucuggcggugguuugguauugagggguugguccguugggauuggaggucugccgggaggugacugacccaauccgccguauagcuguuggggaggcgggucucugugaguacggagaggcugcccgugcagcagguaaugugguggaggaauaugcacugggguucagaggucgggggucggucacugacggagagccaaauccacuacccagagaaguucucagagacccccuugaaggagacacgccugugcugauaacauaagaaggagacugugcucuagauggaacugaacuaacucuucucauggcccgauuggcuacugauggcugaaccaguguuuguccuucagcucuugaauuccucaccacaugguuguuaguugauccuaugaaugaaugcugcugucuguugucugccuugcucacguucuggcuguuguggaaacucccugcuuccugguauccacugucggaauaagaauucauuuguguugaacuucuugaguuacccaaugaucccucacuuucauggagagaugucuguucuggugaauagaggguuccuuguucuggcucuguccugaugagauaguuguugggcuggacagcgucagaaacucuagguuugcuuacaccaguauuuggcacgucuguugaucuccaaggaaaugacuucucaguugagcuggugcuggcgaugcuuggugauucugcuccaagccuacaucuuucuagcugacuggcaacaaucugccuuuccacuuccaguucucgggugagucgcugaaacugaagcuccugcuccuucacggaugcuagaauagugguggcuguggucucggguuccaugccugggccaguggaggcagcuuccuggcgggucugugguugccccuccuccaccaaugaggccugcucaggagcuggcauuccuccuguuucuccccacaaugugucggugccauugacuucuacuucauguuccuucuccauccccagcaagcacuggaccac

SEQ ID NO: 2365 - skipped

SEQ ID NO: 2366 - RNA, 4285 nt, Homo sapiens
uuccaaggaugaaauuuccacauuuauuuuucuuuuaugugaauagaaaauggcagugaaguguccuaugaaugaggcgaggaaugggcauggcgcugcgguaccagccuggacguugugcuuccaaaguacacuaugugugguggagacaaagggugucgcgguuugcuuuuaauugcucacaguuccuugggcuucucauuuguuuuugaaguugucaguuucuucaaaucucuuuucaagugacacauugcauuacaaaugauggcacuuaaccaauguggcauuuccauauuuacaccaacaaaagaaauuuacaagacauaauagcauacaaucuugacauuuaguaauagcaauaaaacaugggcauccauuuuauuuuuucuguacaaacuaucagaacauaacuuuauucacauuaaaaaaaucaucuuuaauuugauuugaccuacauaucccccauuucauuucacccauuucucaaaccucucaucacgucacccacaccuucaccagacuacagaaucuauaaguaauuagaucuaacaccuaaauagagcuuagaaaguccucucccaaacauuuccucacuucccugauaauuccucaaaaaagaaaaaaaaaacacacuucauucauuccuuccacuucacuuucacauuucaaucaucaaaucagcaagauggacuuuucaccucaaucugaacaagguuagaaagaaagaguuccucuguugggcaucuugaugcuacacccaugagucuggggacccuggguacuguucugcucuauaagaaggucguuuaguggaauaaaagucuacauaauuuguggucgauuucaguccauacuguguugaguaaucaguagaagcuggaaagugaacucggucaucaaaauaaggaucuucauagcuaugaggagacugcaaauacaaucuguaugcaucaaaguucuuucuguuggagucaucuugacuauaauacagcuguugaugcuguagccgucuauuuuguucucuugcuggugaggaauaggaacugauguaaauuggugaagguuugcuggagccugacugaaugaugggugacaucuguugguuggugguagacaaggaaggaugugauuugaaucggucucgcuccaaugucgacacagguguaauaaaaugguucugauuccacccauccuuuuuauaaaugcuccggaggucccgauauugccauaauguauucaagaccugggcugcugccuucaccacuuucagagaugaucugucgccccugccuuugguuauguucaccagcuucucuaugccuccugagucggccagggcuuuugcguucuccauguuuuugcuggugaccucgugcagagcacagcagauggcugccauggucucaucagacaagacacuggggccauugccgccggggagccgguugaccaggucucgcauggcguauuugccuaugagcuccuuguugcgaacaucuagugccauauuccucaaggcuguugccacggaagaaacaacucuaucguuauccauucucagaagcuccacaaggauggggagccccuuuucuuuucggacggccgcccggauauaugcugcaaacuuccaguugccagcagagagguucuggagagacccugcagagccuuccaagguggcuggguuggaacuuucugcuagaagagucagauaugguuuuaccaccgaugggugccacagcaucucaaccccuuugggggacuucgacaguccugggauaggaccaacuccaucccauugaucuucuugcggaguccucuuuuucuuuuucuucuucuucccccagcaacuuggcucagagucuuugcugggagacucuuuuccuaguaagucauccaauucguucagucccaguaaccgggccuggggcaccuccagcuccagccgauaggacagguuccucagggugcacacgcaguucuccaccgucuugcugucguaaucggauguguucacacacguguggaucacauacaacagugagucuaccagccccucgcaggaccgcauuugcuuccgagcuucuucccccgcggagcugagguuccuuaggcaaccugucguguuacgcagaacuagugaagucugaaauuuaauuuuaugaucaucaucaaaagaagaguuauuccauccagaauguggaacaaucacaguguuuguuaagguugagagagcaucucgaaugauugucauuuuuacagcaucacaugaggauaaauuccaaagaacuccuguaacaagcucccuuacuucugcaucaauagauuuucucaacagucgcaacaaggcagguaucccaccaacauucuucauugcuauuuuauuuucaucuguagacuugccaaaaacgagguuucgaagggcaccacaagcauucuucugaacuuccaaaacucugugguccagaaggucaaccagaugcuugauucccccuaaccuacacaccuccaucuucacuuuguugucaccaaagcacaggugcugcagguaggccgcugcauuugccugaacagaugggaacuggugcugaagcaugugaaugaccucaggcaacucaggaucacgccaggcaaacucccugggguccuucugaaugcugucuauugauggggaucuuguggugccaucaucagccggcacugcaugcugaagccuguuauaauugcacucuugcacucgguauuguauaggccuguagggcuccgcguagguagcuguuguguucagagcauaauuauuucuuugguauguaaggguacuucguuggcuggauguccuuuguagauuuccaauaccuacugaaccugugcgauacaacgccgucugcgauccuuggagcuccacaguuccaugguuugggcugcgguacacugggcuguaauagguccuccccucauauauaggaguaaugugcaagucgggagacacggcagaacgaaggucuugcccaagcugacuaugcugacuagcauaggaacuccguaagccugucaggcugucuggccuggguggaaccauccucucauaaaugucauacugcugcuguccgaauugcuccaugucaugaacaguccuuugcagugaaggucccagaugcugugguacggcggucaucccugagcguuugggggacgacgaccccaccuggccuugggauggggaagcuacucgagucugugcauccgucagggucaguggggaccccacucuggcggugguuugguauugagggguugguccguugggauuggaggucugccgggaggugacugacccaauccgccguauagcuguuggggaggcgggucucugugaguacggagaggcugcccgugcagcagguaaugugguggaggaauaugcacugggguucagaggucgggggucggucacugacggagagccaaauccacuacccagagaaguucucagagacccccuugaaggagacacgccugugcugauaacauaagaaggagacugugcucuagauggaacugaacuaacucuucucauggcccgauuggcuacugauggcugaaccaguguuuguccuucagcucuugaauuccucaccacaugguuguuaguugauccuaugaaugaaugcugcugucuguugucugccuugcucacguucuggcuguuguggaaacucccugcuuccugguauccacugucggaauaagaauucauuuguguugaacuucuugaguuacccaaugaucccucacuuucauggagagaugucuguucuggugaauagaggguuccuuguucuggcucuguccugaugagauaguuguugggcuggacagcgucagaaacucuagguuugcuuacaccaguauuuggcacgucuguugaucuccaaggaaaugacuucucaguugagcuggugcuggcgaugcuuggugauucugcuccaagccuacaucuuucuagcugacuggcaacaaucugccuuuccacuuccaguucucgggugagucgcugaaacugaagcuccugcuccuucacggaugcuagaauagugguggcuguggucucggguuccaugccugggccaguggaggcagcuuccuggcgggucugugguugccccuccuccaccaaugaggccugcucaggagcuggcauuccuccuguuucuccccacaaugugucggugccauugacuucuacuucauguuccuucuccauccccagcaagcacuggaccac

SEQ ID NO: 2367 - RNA, 2374 nt, Homo sapiens
uugaucuucuugcggaguccucuuuuucuuuuucuucuucuucccccagcaacuuggcucagagucuuugcugggagacucuuuuccuaguaagucauccaauucguucagucccaguaaccgggccuggggcaccuccagcuccagccgauaggacagguuccucagggugcacacgcaguucuccaccgucuugcugucguaaucggauguguucacacacguguggaucacauacaacagugagucuaccagccccucgcaggaccgcauuugcuuccgagcuucuucccccgcggagcugagguuccuuaggcaaccugucguguuacgcagaacuagugaagucugaaauuuaauuuuaugaucaucaucaaaagaagaguuauuccauccagaauguggaacaaucacaguguuuguuaagguugagagagcaucucgaaugauugucauuuuuacagcaucacaugaggauaaauuccaaagaacuccuguaacaagcucccuuacuucugcaucaauagauuuucucaacagucgcaacaaggcagguaucccaccaacauucuucauugcuauuuuauuuucaucuguagacuugccaaaaacgagguuucgaagggcaccacaagcauucuucugaacuuccaaaacucugugguccagaaggucaaccagaugcuugauucccccuaaccuacacaccuccaucuucacuuuguugucaccaaagcacaggugcugcagguaggccgcugcauuugccugaacagaugggaacuggugcugaagcaugugaaugaccucaggcaacucaggaucacgccaggcaaacucccugggguccuucugaaugcugucuauugauggggaucuuguggugccaucaucagccggcacugcaugcugaagccuguuauaauugcacucuugcacucgguauuguauaggccuguagggcuccgcguagguagcuguuguguucagagcauaauuauuucuuugguauguaaggguacuucguuggcuggauguccuuuguagauuuccaauaccuacugaaccugugcgauacaacgccgucugcgauccuuggagcuccacaguuccaugguuugggcugcgguacacugggcuguaauagguccuccccucauauauaggaguaaugugcaagucgggagacacggcagaacgaaggucuugcccaagcugacuaugcugacuagcauaggaacuccguaagccugucaggcugucuggccuggguggaaccauccucucauaaaugucauacugcugcuguccgaauugcuccaugucaugaacaguccuuugcagugaaggucccagaugcugugguacggcggucaucccugagcguuugggggacgacgaccccaccuggccuugggauggggaagcuacucgagucugugcauccgucagggucaguggggaccccacucuggcggugguuugguauugagggguugguccguugggauuggaggucugccgggaggugacugacccaauccgccguauagcuguuggggaggcgggucucugugaguacggagaggcugcccgugcagcagguaaugugguggaggaauaugcacugggguucagaggucgggggucggucacugacggagagccaaauccacuacccagagaaguucucagagacccccuugaaggagacacgccugugcugauaacauaagaaggagacugugcucuagauggaacugaacuaacucuucucauggcccgauuggcuacugauggcugaaccaguguuuguccuucagcucuugaauuccucaccacaugguuguuaguugauccuaugaaugaaugcugcugucuguugucugccuugcucacguucuggcuguuguggaaacucccugcuuccugguauccacugucggaauaagaauucauuuguguugaacuucuugaguuacccaaugaucccucacuuucauggagagaugucuguucuggugaauagaggguuccuuguucuggcucuguccugaugagauaguuguugggcuggacagcgucagaaacucuagguuugcuuacaccaguauuuggcacgucuguugaucuccaaggaaaugacuucucaguugagcugcuccuucacggaugcuagaauagugguggcuguggucucggguuccaugccugggccaguggaggcagcuuccuggcgggucugugguugccccuccuccaccaaugaggccugcucaggagcuggcauuccuccuguuucuccccacaaugugucggugccauugacuucuacuucauguuccuucuccauccccagcaagcacuggaccac

SEQ ID NO: 2368-2390 - skipped (23 entries)

SEQ ID NO: 2391 - RNA, 2343 nt, Homo sapiens
uucaaaauguaaacgugguuuuauuuaaugccuuuuauccaucacaaagcacccauuccuucccagcaucccccucuuccuagaaaacaagauguagcguaaggcacgugcacuguccacaugacgucaaguaggucuuuaaaaacaaaaauaagcaauagucuuuucaacagcuugaacugccuuccucucuaauguucaaagaaugauuguccccacaaagcacaacuuggagaauagagugcuuacauuagaacugugaaccaccccacauaccaguucaaaaaaccaaaccaaaccaacgacuaagaaacccagccacacagguacaagagcauaauuccggaguaaugagacuaguccauaaauuaaaaagaagacaagacaaacccauccccuccucaucaccaggcaccccccaaaucagcaauuccuugcuuuuguucugugagucuuacagaagagucuagacuccgagccagcccuuuuccccaaagucaaauacuccgaagccaauguuggguacuuuccuucucagaacccccauuuggacugauggacggcuucugagauggucacuggacacgucgucucggcuguggggccccuuccugguguccaacaucugggucucuggaguucucgguggggagguggggaaggcgagggggucugagggugagauggcagguggagaugcugcugauccugcuauaaauacuccagcuccagggcgugccucagugccuccaggucugcguggcaggauauccgccagaaaggcauguugugcuuuuucgcuccuugcuccucuuccacaccaucaccgaucaccacguagacagcuuuucugccgaaucucugcauuauccucucgaagcagcucuccuucccaccaacguuguucuuguagguauuguacaucuccuucacccgccgguagcggaaggccagcuuccucauccaguccacgccgccgugcacgccagagcccaggcacagguuggcuccuggggccgaacuguggaagccgucagcggagaaguuguaugugcuuaaaucuuggccauugucaucugaugagacgucaucaacguggaucuggucacaauccuccaggucauugaagaacagauguguaucugcaagguugaagaucaucucuuccaucauaaggccaaugcgcacggacgucgugguguccuucccguaucuggaugcaaauguccccgugaguaaggagugaaaaauaauuauugucucauccaagucccacacgaacacacgcucaaucucauuguccccugccggggacgggucacugcuccucuuagaccggccucggagcuucccgucggaggcccggugcggccugucugugucucccucuuucgcugguguggaagguccauuguguguguuguauucaccagcaagugacucggaacucugguuggggacguugugagaugccuccuggaggacguagguggacguggagaggggcgaagggcagaugcugcuggccgggacguagggaggguuguaggaugagccguaauacuggggguacuggcucugggggaagccgggguaggaaggauaguccuggugcacacucccgaaaccggcugcguugcccaguccauuuccuccuugauagaacccuguugugccgugcaucugguagguguaugggcucuguccagugggugaggugcugaagcuggagccauagcugaggaauccacucuggccaggggaaugguucaagcugucuucugucuugaugcuguaggaagggauuccauaggcuugugcuggagguggguaagcuguauaggggguagccugcuggauccccgcacuguacugcgucuggccguaggcugccauggcuguggaaggcuggcgggggaggacacgugggcaagaucuggagaagagcugggacacucucaggggggccgauuuggugaugccuugucugucacucagaguccacacagcagcgucagcacgguuaaacuucaguuuauccagacaaucgcuguuuacagugaggcugggugagaucacuaguucuaccauuuccuuguaccuggcuaaccagucaaaggauguucaagcaguuuauuuuuauuggucucugaguccaccauccagcaaguauuuugauccucccgccgccauuuuccucgcagcucagcuuuaaaucggaaacucgccgcucagcccgcagccgccgccggccgccaccgacuaagccgcagccgcugccgucgcuguggagcggcugagacagcagcagcuaaagucgccgcacgggggccacugggauau

SEQ ID NO: 2392 - RNA, 2411 nt, Homo sapiens
uucaaaauguaaacgugguuuuauuuaaugccuuuuauccaucacaaagcacccauuccuucccagcaucccccucuuccuagaaaacaagauguagcguaaggcacgugcacuguccacaugacgucaaguaggucuuuaaaaacaaaaauaagcaauagucuuuucaacagcuugaacugccuuccucucuaauguucaaagaaugauuguccccacaaagcacaacuuggagaauagagugcuuacauuagaacugugaaccaccccacauaccaguucaaaaaaccaaaccaaaccaacgacuaagaaacccagccacacagguacaagagcauaauuccggaguaaugagacuaguccauaaauuaaaaagaagacaagacaaacccauccccuccucaucaccaggcaccccccaaaucagcaauuccuugcuuuuguucugugagucuuacagaagagucuagacuccgagccagcccuuuuccccaaagucaaauacuccgaagccaauguuggguacuuuccuucucagaacccccauuuggacugauggacggcuucugagauggucacuggacacgucgucucggcuguggggccccuuccugguguccaacaucugggucucuggaguucucgguggggagguggggaaggcgagggggucugagggugagauggcagguggagaugcugcugauccugcuauaaauacuccagcuccagggcgugccucagugccuccaggucugcguggcaggauauccgccagaaaggcauguugugcuuuuucgcuccuugcuccucuuccacaccaucaccgaucaccacguagacagcuuuucugccgaaucucugcauuauccucucgaagcagcucuccuucccugucuugguugcacuguagauguucucaauaggaaacacagaccccaggccauauagcaggacuuuggccagggcaggaauuaguugagugguggugaccagcacauugacacaguugggccgggaguugaugagguuuagugccuucagggagugggucagccagaggucugugagagcuuccagcucagcucggagcuguagccaggucucccuuuugggagugccuaucaacccaccaacguuguucuuguagguauuguacaucuccuucacccgccgguagcggaaggccagcuuccucauccaguccacgccgccgugcacgccagagcccaggcacagguuggcuccuggggccgaacuguggaagccgucagcggagaaguuguaugugcuuaaaucuuggccauugucaucugaugagacgucaucaacguggaucuggucacaauccuucccguaucuggaugcaaauguccccgugaguaaggagugaaaaauaauuauugucucauccaagucccacacgaacacacgcucaaucucauuguccccugccggggacgggucacugcuccucuuagaccggccucggagcuucccgucggaggcccggugcggccugucugugucucccucuuucgcugguguggaagguccauuguguguguuguauucaccagcaagugacucggaacucugguuggggacguugugagaugccuccuggaggacguagguggacguggagaggggcgaagggcagaugcugcuggccgggacguagggaggguuguaggaugagccguaauacuggggguacuggcucugggggaagccgggguaggaaggauaguccuggugcacacucccgaaaccggcugcguugcccaguccauuuccuccuugauagaacccuguugugccgugcaucugguagguguaugggcucuguccagugggugaggugcugaagcuggagccauagcugaggaauccacucuggccaggggaaugguucaagcugucuucugucuugaugcuguaggaagggauuccauaggcuugugcuggagguggguaagcuguauaggggguagccugcuggauccccgcacuguacugcgucuggccguaggcugccauggcuguggaaggcuggcgggggaggacacgugggcaagaucuggagaagagcugggacacucucaggggggccgauuuggugaugccuugucugucacucagaguccacacagcagcgucagcacgguuaaacuucaguuuauccagacaaucgcuguuuacagugaggcugggugagaucacuaguucuaccauuuccuuguaccucccgccgccauuuuccucgcagcucagcuuuaaaucggaaacucgccgcucagcccgcagccgccgccggccgccaccgacuaagccgcagccgcugccgucgcuguggagcggcugagacagcagcagcuaaagucgccgcacgggggccacugggauau

SEQ ID NO: 2393 - RNA, 2580 nt, Homo sapiens
uucaaaauguaaacgugguuuuauuuaaugccuuuuauccaucacaaagcacccauuccuucccagcaucccccucuuccuagaaaacaagauguagcguaaggcacgugcacuguccacaugacgucaaguaggucuuuaaaaacaaaaauaagcaauagucuuuucaacagcuugaacugccuuccucucuaauguucaaagaaugauuguccccacaaagcacaacuuggagaauagagugcuuacauuagaacugugaaccaccccacauaccaguucaaaaaaccaaaccaaaccaacgacuaagaaacccagccacacagguacaagagcauaauuccggaguaaugagacuaguccauaaauuaaaaagaagacaagacaaacccauccccuccucaucaccaggcaccccccaaaucagcaauuccuugcuuuuguucugugagucuuacagaagagucuagacuccgagccagcccuuuuccccaaagucaaauacuccgaagccaauguuggguacuuuccuucucagaacccccauuuggacugauggacggcuucugagauggucacuggacacgucgucucggcuguggggccccuuccugguguccaacaucugggucucuggaguucucgguggggagguggggaaggcgagggggucugagggugagauggcagguggagaugcugcugauccugcuauaaauacuccagcuccagggcgugccucagugccuccaggucugcguggcaggauauccgccagaaaggcauguugugcuuuuucgcuccuugcuccucuuccacaccaucaccgaucaccacguagacagcuuuucugccgaaucucugcauuauccucucgaagcagcucuccuucccugucuugguugcacuguagauguucucaauaggaaacacagaccccaggccauauagcaggacuuuggccagggcaggaauuaguugagugguggugaccagcacauugacacaguugggccgggaguugaugagguuuagugccuucagggagugggucagccagaggucugugagagcuuccagcucagcucggagcuguagccaggucucccuuuugggagugccuaucaacccaccaacguuguucuuguagguauuguacaucuccuucacccgccgguagcggaaggccagcuuccucauccaguccacgccgccgugcacgccagagcccaggcacagguuggcuccuggggccgaacuguggaagccgucagcggagaaguuguaugugcuuaaaucuuggccauugucaucugaugagacgucaucaacguggaucuggucacaauccuccaggucauugaagaacagauguguaucugcaagguugaagaucaucucuuccaucauaaggccaaugcgcacggacgucgugguguccuucccguaucuggaugcaaauguccccgugaguaaggagugaaaaauaauuauugucucauccaagucccacacgaacacacgcucaaucucauuguccccugccggggacgggucacugcuccucuuagaccggccucggagcuucccgucggaggcccggugcggccugucugugucucccucuuucgcugguguggaagguccauuguguguguuguauucaccagcaagugacucggaacucugguuggggacguugugagaugccuccuggaggacguagguggacguggagaggggcgaagggcagaugcugcuggccgggacguagggaggguuguaggaugagccguaauacuggggguacuggcucugggggaagccgggguaggaaggauaguccuggugcacacucccgaaaccggcugcguugcccaguccauuuccuccuugauagaacccuguugugccgugcaucugguagguguaugggcucuguccagugggugaggugcugaagcuggagccauagcugaggaauccacucuggccaggggaaugguucaagcugucuucugucuugaugcuguaggaagggauuccauaggcuugugcuggagguggguaagcuguauaggggguagccugcuggauccccgcacuguacugcgucuggccguaggcugccauggcuguggaaggcuggcgggggaggacacgugggcaagaucuggagaagagcugggacacucucaggggggccgauuuggugaugccuugucugucacucagaguccacacagcagcgucagcacgguuaaacuucaguuuauccagacaaucgcuguuuacagugaggcugggugagaucacuaguucuaccauuuccuuguaccuggcuaaccagucaaaggauguucaagcaguuuauuuuuauuggucucugaguccaccauccagcaaguauuuugauccucccgccgccauuuuccucgcagcucagcuuuaaaucggaaacucgccgcucagcccgcagccgccgccggccgccaccgacuaagccgcagccgcugccgucgcuguggagcggcugagacagcagcagcuaaagucgccgcacgggggccacugggauau

SEQ ID NO: 2394-2452 - skipped (59 entries)

SEQ ID NO: 2453 - RNA, 2411 nt, Homo sapiens
ggagaaguauucaguuugcuacuuugugucaccccuugccauucuuuuauccccaguuaauuauuaucugcauauaauauaaaucugcuagaccauaaauuaacagcuuucaggacagaugccuugaaaguucuuagggagguuaaacaaauauuguagccuaaaaccuccucuauaacaaacaugcacacaauggaagugaugucguaagugagugauggggcaggaaggaccuagggcucugucucgacuauaaaaucaccuugccccaaacaaauuuaaauuauaacuuaggagguucauggacuuucauccauuacaggggcuuguccuucuuggagaaaaaggucugaccuuccaaacuuucacaacacacugagcauacaaagcaagugucaugccagguguagcccagagcuuccaggaacaugucaccagcuucuaugggaaauucacauccauggcauauaguaccaaagagggcauaauaaucagucucacaguaggguucaccauccuccaagugaaaaacauuguuccgaaugggcuuuccacaggcuacacacacaaaacaggaaacaugccaaguuuguuucaacgcacugaugacuucuccaaggaucuuccuuuggcaucgaccacauucaggggcaaagaauuucucauagcacagcucacaauacagggcuccuuucuccucuacaaauccaauguaggccauuguauuuuugcagugagcgcaguugaauucuucugggugccaagauuuccccagugccacuaagaaugguccucugaugaccugguuacaaugggcgcacaucggaguucguuucccugcuggaaugugcucagcucuuugcacuaaaguguccuggucacuuggcuggguuugucccaaagcugaguuggcuggugccacugauccugaguaaguagcgcuguuugagauucuuccaguggaagguacuccuugguuuggccguugccagcuuggugacuugaugacgccaguggauccuacaggcuugaaggcagcugcagcugugaggcugguaaccccuggucugccagagguugggcuguccaggcucucgggcaugcuccguguggaagcuaccgaggaagccaacugcggagaaggcuccugagaguuauuugccuucuuuguauuaucggcuucagauucuuucaaauguucagucccagugaucugggcaaggauucggaaagagcgagacugaguuguuccaguccuuggacgccagucuucaguauccucaaucagucucuucuugcuggcaucacugugaguggguacaugauaaaacucuguauagcgcuccacaauguguuuucuuggugggcguuuaggugggauuuucccauuuugcuguuuacugucacccugggauccucuucucugucccucugcuagcuccugagaagucucggaacacacgcuggugacugugggcuuuugaacaggaaccggcucaggcuugggugcagcagaugcucuuugcagagucauauucaaagagccuguacaacccuuaaucuuauucugggcuucaagaugagucauuccuugugcauuuauuccaucaaugcugagaaccacaucgccuauucuuacauuugccugggcugccuugccgccaucuuuuagcagcagagggaggccugauccacuuccugagcucugagacugcucaauuaagucucucagggauucuccaggaggaauguaaguuucauccuguucuaacccaaugcuguaucgaggucugguuucuugucuuuuauaccggaaguaacaaaauaauaugauaaggaccaagagcaaacuacagacagucacagauauaaguaaagcccugugguguauagguccaucaacaaaaucucuguuuuucaauggaggcaguguaggguguaggucuuuauuacauucguuccuuucugugcagcauucaauugaucuucuuugaugaggaaugggagugucccgacacugaaaaucugagccuucuaguccuaggcaaccagaagugaccacaggcaacccagagucauccucuucuaucaucgugaaacaauauccgucugugcugcaaauauuguugacugagucuucuggacaauggugguggcauuuacaacgcaagaccuuuggacggggggugggggcuguacucucaccauccucuuucuuggugcccacauuuaauuuuccugcacuucgcaaaagcauguuaucaaggaaguuuguuuugauuucuguacgcuugauauaugguugccaggcucccuaggaugagagacaugaggaggaggcacagaauugcuagggguuuccacuaaaaagcccagcaccguaggcagcacuaauccugcaccugugauau

SEQ ID NO: 2454 - RNA, 6935 nt, Homo sapiens
ucauuuacaacaaugcagucauuuauuuauugaguaugugcacauuaugguauuauuacuauacugauuauauuuaucaugugacuucuaauuagaaaauguauccaaaagcaaaacagcagauauacaaaauuaaagagacagaagauagacauuaacagauaaggcaacuuauacauugagaauccaaauccaauacauuuaaacauuugggaaaugagggggacaaauggaagccagaucaaauuuguguaaaacuauucaguauguuucccuugcuucaugucugagaaggcucucccuucaauggggaugacaaacuccaaaugccacacaaauguuaacagaauacuagauucacacuggaacggggguaaagaagaaauuauuuucuauaaaagggcuccuaauguaguacugcuugaaaaugguacauuuuuguuguagauuauuuuaaacauaaugcuauaguaauauuuugaagauuugagcuguuauuuccauuuguuuuuacacugugacuaaaugauuagguuuuaguuuuagacucuaaacggaaccugaauuaauaggaaauaaacacgguacuauaguuguccuauggugccccuaugggugauggguuccaagaacccccuaggauacuaaaguccaugauguucaagucccuuauagaaaaugguguaguauuugcauauaaccuaugcacauccuaccauacacuuuaaaucaucucuagauuaccuauaauagcuaauacaauguaaaugcuuuguaaauaguuguuauacuauauuguuuaaugacaaaaaaaaguuuguacauguucagcaaaggcgcaaccauccauuuuuuuccccaaauauuuuugacccacagugggcugaaucacagaugcgaagccuauggacauggagggccaacuggacaagcauaagcaggggauacuuuuuagguugcuacuucagcaggcaacauucagaccauggaagucuagagaaagauuauaaaucugaacuuaccgcuaaaaauuuuaaaaugggaaauaaauccaaggaguuuuuagucaugcauuaugauuuuaaucuauguuaugccaaguacagcauuccaaaauauacaucuagagacuaaaaguaaaugcucuauagugaagaaguaauaauuaaaaaaugcuacuaauauagaaaauuuauaaucagaaaaauaaauauucagggagcucaccagaagaauaaagugcucugccaguuauuaaaggauuacugcuggugaauuaaauauggcauuccccaagggaaacagagagauucuucuggauuauguucaauauuuauuucacaggauuaacuguuuuaggaacagauauaaagcuucgccacggaagagauggacaaagcacaaagacaacaugauaccuuaggaagcaacacuacccuuucaggcauaaaauuuggagaaaugcaacauuaugcuucaugaauaauauguagaaagaaggucugaugaaaaugacauccuuaauguaagauaacuuuauaagaaaucugggucaaauaaaauucuuugaagaaaacauccaaaugucauugacuuaucaaauacuaucuuggcauauaaccuaugaaggcaaaacuaaacaaacaaacaaaaagcucacaccaaacaaaaccaucaacuuauuuuguauucuauaacauacaagacuguaaagaugugacaguguacauuauaugacaaugcacauuagccagcaagucuuuuauaggugguuucagcagcaacgauaaauaaugcagaauucagcuccagcacuuuauuucaaaagaaauuuccugccucccuccaagaugcagggugaggagguagcuugggguugcuauuggagaaguauucaguuugcuacuuugugucaccccuugccauucuuuuauccccaguuaauuauuaucugcauauaauauaaaucugcuagaccauaaauuaacagcuuucaggacagaugccuugaaaguucuuagggagguuaaacaaauauuguagccuaaaaccuccucuauaacaaacaugcacacaauggaagugaugucguaagugagugauggggcaggaaggaccuagggcucugucucgacuauaaaaucaccuugccccaaacaaauuuaaauuauaacuuaggagguucauggacuuucauccauucuggaaacaaagagaaaaaccaaaucaaauaccagaaucuguuuucucacugggcaaauagcaacaggauccacaguuuuaccacaauuguuucccugucuccaugugguaucuacauaauucuuuucccaaaggaggaaaucaaauaacaggccaaucugaguaauuaaacuccccucccaacacuacccaaccucugugaauaaaagcuuuccaaacuuugugaucacauuugaaauugguucacuuauuauugagagaaaaccacaaaaagucucaauuucaucacauccucaaaccaaucuuuuaauuuuuaaaugcagaagaagaaacaaaacgaaacaaaaagaucauucugcaaagagaccucucaacucuucaucagccaguggcauaacucagaaacugauuuaacuaauuuauuauuugagaaaaggggauugaaaaacaauugggggguauaaucuucugauucacaauucccagccacauucuuuucuauuuauucucucucucucuuuuuuuuuuuuuuuuuuuuuuuuuaagagccggagucuugcucugucaccaggcuggagugcaguggugugaucucagcucacugcaacuuccgucuccuggguucaagaauuuuccugccucagccucccaaguacaugggacuacaggcacgccccaccaugcccagcucauuuuuguauuuuuaguagagacaggguuucaccauguuggccaggaugaucuugaucucuugaccucaugauccgcccgucuuggccucccaaagugcugggaucacaggcgugagccaccacaccuggcccucuauuuauucucuuuaaagagagagaaaacuaugagaggccaaaauuauuuaauuaaaucuuuaccuuagcacaagggaaaaaaauggaauuugccuaauauaggugaugaagcauacacaaugaauagaaacaaucacauuuuaguaaaaggcaaaaauuugagacuuauaagcuauaugguagcuuauuuuuggguggggaagaaaugagaaaagaauauaacaucucuuacuggcaugacacauuuugauaaaaaaucuuauuguccuuuccuacuagaaugauccacuguaaggcaaaaauaauauacaagcaaaguuuuuuuuuggagacagagucucacucugucacccaggcuggagugcagugguacgaucuuggcucacugcaaccucucccucccggguucaagugauucucgugccucagccucuugaguagcugggauuacaggcgcgugccacugcguccggcuaauuuuuguauuuuuaguagagaugggguuucaccauguuggccaggcugaucucaaacuccugaccucaugugguccacccaccuuggccucccaaagugcugggauuacaggcgugagccaccgcgcucagccuacaagcaauuuuuuaaaaacugacaccuauuacugauaaaauucucuguuuaaaauccuauuuacuauuuuaaagauaaguauuaguuuuuuuuuaaauacaauaauucuguuauugauaaaauuuaaggcauuuucauugccuuuugcagauuuacucauaacuaccuaacaaggaaagaagguauaauuauuucagauuggauuauuuauucuaaaauuaaauucuucacuaauuuauucuaagaugaauuuaauaguccaucaggaaauugguuuuuauaaagcuuauuuuaugggcauaaaauacaggaaaaaguaauaauaaaugccaaaccgucucuuuacuuuaugaagccaaauauuuccucagacuugguuuuuaaagcuggaauuuauuccuucagggccacuauuauuuuucaaaacuccauauaaauauugaaucuaaaaauuaauuaguaauuuuaauuuuccuuuuucucuucaaauuccuucucuucuccugaacuguugacuuucaaaaauucacagaaugagcauguuucuuacacaggggcuuguccuucuuggagaaaaaggucugaccuuccaaacuuucacaacacacugagcauacaaagcaagugucaugccagguguagcccagagcuuccaggaacaugucaccagcuucuaugggaaauucacauccauggcauauaguaccaaagagggcauaauaaucagucucacaguaggguucaccauccuccaagugaaaaacauuguuccgaaugggcuuuccacaggcuacacacacaaaacaggaaacaugccaaguuuguuucaacgcacugaugacuucuccaaggaucuuccuuuggcaucgaccacauucaggggcaaagaauuucucauagcacagcucacaauacagggcuccuuucuccucuacaaauccaauguaggccauuguauuuuugcagugagcgcaguugaauucuucugggugccaagauuuccccagugccacuaagaaugguccucugaugaccugguuacaaugggcgcacaucggaguucguuucccugcuggaaugugcucagcucuuugcacuaaaguguccuggucacuuggcuggguuugucccaaagcugaguuggcuggugccacugauccugaguaaguagcgcuguuugagauucuuccaguggaagguacuccuugguuuggccguugccagcuuggugacuugaugacgccaguggauccuacaggcuugaaggcagcugcagcugugaggcugguaaccccuggucugccagagguugggcuguccaggcucucgggcaugcuccguguggaagcuaccgaggaagccaacugcggagaaggcuccugagaguuacuuguuuucuuaacauggauagagccaguugauuuccuugaggacugcagauaggaaaaagcuaaaggcuuggagacagggcugaugcaaagugcauccaggagugagugauaucuuucaggaguguagagccugguuuuuguagcaauaacagcagacacaguagcagcugcgcugcucagaacugcagcacuauaucuagcaggagaagagaagguagaaaaguuucgaaaaccuucgaaagaaucuuccacauuuccuguggagcugcuuaaacuagaauaaguaguugcuacuuuagaaaguguggccacuuggcuaccaauaguuaacaccugaggaguugcaggagggugagguccacucuuagguaggucuuccagagcacugucaaacuuugccuucuuuguauuaucggcuucagauucuuucaaauguucagucccagugaucugggcaaggauucggaaagagcgagacugaguuguuccaguccuuggacgccagucuucaguauccucaaucagucucuucuugcuggcaucacugugaguggguacaugauaaaacucuguauagcgcuccacaauguguuuucuuggugggcguuuaggugggauuuucccauuuugcuguuuacugucacccugggauccucuucucugucccucugcuagcuccugagaagucucggaacacacgcuggugacugugggcuuuugaacaggaaccggcucaggcuugggugcagcagaugcucuaauaaauuuaacagccaggcccaggucagcaauacagcaaguuccauuuuucuucaccagaauguuuuuacuuuucagaucucgaugggcaauugcugguuugccuugaguacuaaagauuucuguguguaaaugacauaagccacugacagaagaguaggcuaacuucagcauugauuuagcgucuagggugguggacuucagauaaucauaaagggaaccauuuucaugauagucugugauuagguacaacuggguccaggacccugucccuuugauaucugcagcaaugaaacccaaaauguuuucaugccucaucaacacugucugauauauuucugucucucugaaccagcuggcuuccucuguggugaagaacacuuucacagcuaccuuuucgccacgccacuuucccauccaaacuuccccauagcgaccuuuuccaaucuguuucaccaucugaaucugcuuagcuauaguccuuuggaccagcagagggaggccugauccacuuccugagcucugagacugcucaauuaagucucucagggauucuccaggaggaauguaaguuucauccuguucuaacccaaugcuguaucgaggucugguuucuugucuuuuauaccggaaguaacaaaauaauaugauaaggaccaagagcaaacuacagacagucacagauauaaguaaagcccugugguguauagguccaucaacaaaaucucuguuuuucaauggaggcaguguaggguguaggucuuuauuacauucguuccuuucugugcagcauucaauugaucuucuuugaugaggaaugggagugucccgacacugaaaaucugagccuucuaguccuaggcaaccagaagugaccacaggcaacccagagucauccucuucuaucaucgugaaacaauauccgucugugcugcaaauauuguugacugagucuucuggacaauggugguggcauuuacaacgcaagaccuuuggacggggggugggggcuguacucucaccauccucuuucuuggugcccacauuuaauuuuccugcacuucgcaaaagcauguuaucaaggaaguuugcugaaagaagaaauagugagaguuaggcaucugugggguagacuaccccaguc

SEQ ID NO: 2455 - RNA, 2081 nt, Homo sapiens
ugucagagaauuguuuauuuuacccaguuauacuguaauaaguccuggauggcacugugucuagccucaaggaaacagaacaaguacaaagcuaaguuaaaggcaacuuuauuacaauacuuuuccaaacuucaaaaugcauuuauuacuaaauuuagcucuaauauauaauacacuauauuacaaggcagaaagcauuucuggucauauauuuagcuuccauguauugcccaaaacacagcuuccuaggaauagcagcagugcacaguaguuuacgucacuaaguaaaauauuucucugaugucucacaaucauucauauuguaauuuauuuuauguucuucugauuaaaaaaagcaaagcuaucuuuuccauaucuuauuaguuaauaccuagaaauugucuauauucuaaaaauauccacuagagauauuuccuuugauaggaaauaggauuugcaaauccaaccaaaccaaagaauacuguauuucuccauugcaaauagggguaaaauucucuucuuuccuuuuucaggagccaaaucuggaccuccuccucuucauagagccauccugaauaguaccuacuuuaaaagauaccuaaaucuacaaugcacgcacucuucuuuaauaaagucuuuguuuauucuugccuccuuauauuuacuuauuuagaauaauuuacaaucaacuuugaauguaacauaauaaugaacuuaaaaaguaaucuugggagauguuaauaauauaaagaaaguauuuuccaaauuagacaaggacuuuauuugcucauuauccucugcuucaaccaaccaacuaaccaaauucaacuuaugaaaauaauucguuuuccaagauuacuacccuaaucacaacaaaaacagauacaaauccacaaauagaucuagucccuuaauuuucuauuuuuuuuuuuuuuugguuuuacauuugugagcuaccaacuagcacaaaacauguucaucuuccuuuucucacaacaauaggaaauuguuagaaaaguauagaaaaaguucuauuuuuucauaaggcaaauuuaauacagauuuugcuaugaaguugaaaaaaaaaaaguaaaugaaaagguaugugcuggcugcuuggggggcaaggcucauaaaucacuguacguuaagagcacgugcugaaacuucauggugccagucacguaauuuuguguauuugggacuaaagacgugaagggguaucuuuuccuuugccuucuuuguauuaucggcuucagauucuuucaaauguucagucccagugaucugggcaaggauucggaaagagcgagacugaguuguuccaguccuuggacgccagucuucaguauccucaaucagucucuucuugcuggcaucacugugaguggguacaugauaaaacucuguauagcgcuccacaauguguuuucuuggugggcguuuaggugggauuuucacagugccaggguuauuugucacuuguguuuucuuuugaacaggaaccggcucaggcuugggugcagcagaugcucuuugcagagucauauucaaagagccuguacaacccuuaaucuuauucugggcuucaagaugagucauuccuugugcauuuauuccaucaaugcugagaaccacaucgccuauucuuacauuugccugggcugccuugccgccaucuuuuagacuagagauugucagaggcauguugaaauccuuaccgcccugcagccggaaaccccaaggagcugggccaaccagugacacacuguaguugcucaugguucuaauggcucaaaguccaaugacagaaaaugaaauaugcuucucacuuauggcaggcuugcuuguuuaacuuuuuguuuccucucuugucauagcucagagccaaaugguuaugaaucagcagaagucugaaccuuuaucaacaaggcaugaaaugaucuuccuuuccuuucacaucuaagaaagaguaggcugaacuccaccccgcggcugcgcucccggcucccgcguccucagcgccgcggucuccgcacugcccggcgucccgcgaggccccgccgacuccgcgccccgcg

SEQ ID NO: 2456 - RNA, 6596 nt, Homo sapiens
ucauuuacaacaaugcagucauuuauuuauugaguaugugcacauuaugguauuauuacuauacugauuauauuuaucaugugacuucuaauuagaaaauguauccaaaagcaaaacagcagauauacaaaauuaaagagacagaagauagacauuaacagauaaggcaacuuauacauugagaauccaaauccaauacauuuaaacauuugggaaaugagggggacaaauggaagccagaucaaauuuguguaaaacuauucaguauguuucccuugcuucaugucugagaaggcucucccuucaauggggaugacaaacuccaaaugccacacaaauguuaacagaauacuagauucacacuggaacggggguaaagaagaaauuauuuucuauaaaagggcuccuaauguaguacugcuugaaaaugguacauuuuuguuguagauuauuuuaaacauaaugcuauaguaauauuuugaagauuugagcuguuauuuccauuuguuuuuacacugugacuaaaugauuagguuuuaguuuuagacucuaaacggaaccugaauuaauaggaaauaaacacgguacuauaguuguccuauggugccccuaugggugauggguuccaagaacccccuaggauacuaaaguccaugauguucaagucccuuauagaaaaugguguaguauuugcauauaaccuaugcacauccuaccauacacuuuaaaucaucucuagauuaccuauaauagcuaauacaauguaaaugcuuuguaaauaguuguuauacuauauuguuuaaugacaaaaaaaaguuuguacauguucagcaaaggcgcaaccauccauuuuuuuccccaaauauuuuugacccacagugggcugaaucacagaugcgaagccuauggacauggagggccaacuggacaagcauaagcaggggauacuuuuuagguugcuacuucagcaggcaacauucagaccauggaagucuagagaaagauuauaaaucugaacuuaccgcuaaaaauuuuaaaaugggaaauaaauccaaggaguuuuuagucaugcauuaugauuuuaaucuauguuaugccaaguacagcauuccaaaauauacaucuagagacuaaaaguaaaugcucuauagugaagaaguaauaauuaaaaaaugcuacuaauauagaaaauuuauaaucagaaaaauaaauauucagggagcucaccagaagaauaaagugcucugccaguuauuaaaggauuacugcuggugaauuaaauauggcauuccccaagggaaacagagagauucuucuggauuauguucaauauuuauuucacaggauuaacuguuuuaggaacagauauaaagcuucgccacggaagagauggacaaagcacaaagacaacaugauaccuuaggaagcaacacuacccuuucaggcauaaaauuuggagaaaugcaacauuaugcuucaugaauaauauguagaaagaaggucugaugaaaaugacauccuuaauguaagauaacuuuauaagaaaucugggucaaauaaaauucuuugaagaaaacauccaaaugucauugacuuaucaaauacuaucuuggcauauaaccuaugaaggcaaaacuaaacaaacaaacaaaaagcucacaccaaacaaaaccaucaacuuauuuuguauucuauaacauacaagacuguaaagaugugacaguguacauuauaugacaaugcacauuagccagcaagucuuuuauaggugguuucagcagcaacgauaaauaaugcagaauucagcuccagcacuuuauuucaaaagaaauuuccugccucccuccaagaugcagggugaggagguagcuugggguugcuauuggagaaguauucaguuugcuacuuugugucaccccuugccauucuuuuauccccaguuaauuauuaucugcauauaauauaaaucugcuagaccauaaauuaacagcuuucaggacagaugccuugaaaguucuuagggagguuaaacaaauauuguagccuaaaaccuccucuauaacaaacaugcacacaauggaagugaugucguaagugagugauggggcaggaaggaccuagggcucugucucgacuauaaaaucaccuugccccaaacaaauuuaaauuauaacuuaggagguucauggacuuucauccauucuggaaacaaagagaaaaaccaaaucaaauaccagaaucuguuuucucacugggcaaauagcaacaggauccacaguuuuaccacaauuguuucccugucuccaugugguaucuacauaauucuuuucccaaaggaggaaaucaaauaacaggccaaucugaguaauuaaacuccccucccaacacuacccaaccucugugaauaaaagcuuuccaaacuuugugaucacauuugaaauugguucacuuauuauugagagaaaaccacaaaaagucucaauuucaucacauccucaaaccaaucuuuuaauuuuuaaaugcagaagaagaaacaaaacgaaacaaaaagaucauucugcaaagagaccucucaacucuucaucagccaguggcauaacucagaaacugauuuaacuaauuuauuauuugagaaaaggggauugaaaaacaauugggggguauaaucuucugauucacaauucccagccacauucuuuucuauuuauucucucucucucuuuuuuuuuuuuuuuuuuuuuuuuuaagagccggagucuugcucugucaccaggcuggagugcaguggugugaucucagcucacugcaacuuccgucuccuggguucaagaauuuuccugccucagccucccaaguacaugggacuacaggcacgccccaccaugcccagcucauuuuuguauuuuuaguagagacaggguuucaccauguuggccaggaugaucuugaucucuugaccucaugauccgcccgucuuggccucccaaagugcugggaucacaggcgugagccaccacaccuggcccucuauuuauucucuuuaaagagagagaaaacuaugagaggccaaaauuauuuaauuaaaucuuuaccuuagcacaagggaaaaaaauggaauuugccuaauauaggugaugaagcauacacaaugaauagaaacaaucacauuuuaguaaaaggcaaaaauuugagacuuauaagcuauaugguagcuuauuuuuggguggggaagaaaugagaaaagaauauaacaucucuuacuggcaugacacauuuugauaaaaaaucuuauuguccuuuccuacuagaaugauccacuguaaggcaaaaauaauauacaagcaaaguuuuuuuuuggagacagagucucacucugucacccaggcuggagugcagugguacgaucuuggcucacugcaaccucucccucccggguucaagugauucucgugccucagccucuugaguagcugggauuacaggcgcgugccacugcguccggcuaauuuuuguauuuuuaguagagaugggguuucaccauguuggccaggcugaucucaaacuccugaccucaugugguccacccaccuuggccucccaaagugcugggauuacaggcgugagccaccgcgcucagccuacaagcaauuuuuuaaaaacugacaccuauuacugauaaaauucucuguuuaaaauccuauuuacuauuuuaaagauaaguauuaguuuuuuuuuaaauacaauaauucuguuauugauaaaauuuaaggcauuuucauugccuuuugcagauuuacucauaacuaccuaacaaggaaagaagguauaauuauuucagauuggauuauuuauucuaaaauuaaauucuucacuaauuuauucuaagaugaauuuaauaguccaucaggaaauugguuuuuauaaagcuuauuuuaugggcauaaaauacaggaaaaaguaauaauaaaugccaaaccgucucuuuacuuuaugaagccaaauauuuccucagacuugguuuuuaaagcuggaauuuauuccuucagggccacuauuauuuuucaaaacuccauauaaauauugaaucuaaaaauuaauuaguaauuuuaauuuuccuuuuucucuucaaauuccuucucuucuccugaacuguugacuuucaaaaauucacagaaugagcauguuucuuacacaggggcuuguccuucuuggagaaaaaggucugaccuuccaaacuuucacaacacacugagcauacaaagcaagugucaugccagguguagcccagagcuuccaggaacaugucaccagcuucuaugggaaauucacauccauggcauauaguaccaaagagggcauaauaaucagucucacaguaggguucaccauccuccaagugaaaaacauuguuccgaaugggcuuuccacaggcuacacacacaaaacaggaaacaugccaaguuuguuucaacgcacugaugacuucuccaaggaucuuccuuuggcaucgaccacauucaggggcaaagaauuucucauagcacagcucacaauacagggcuccuuucuccucuacaaauccaauguaggccauuguauuuuugcagugagcgcaguugaauucuucugggugccaagauuuccccagugccacuaagaaugguccucugaugaccugguuacaaugggcgcacaucggaguucguuucccugcuggaaugugcucagcucuuugcacuaaaguguccuggucacuuggcuggguuugucccaaagcugaguuggcuggugccacugauccugaguaaguagcgcuguuugagauucuuccaguggaagguacuccuugguuuggccguugccagcuuggugacuugaugacgccaguggauccuacaggcuugaaggcagcugcagcugugaggcugguaaccccuggucugccagagguugggcuguccaggcucucgggcaugcuccguguggaagcuaccgaggaagccaacugcggagaaggcuccugagaguuacuuguuuucuuaacauggauagagccaguugauuuccuugaggacugcagauaggaaaaagcuaaaggcuuggagacagggcugaugcaaagugcauccaggagugagugauaucuuucaggaguguagagccugguuuuuguagcaauaacagcagacacaguagcagcugcgcugcucagaacugcagcacuauaucuagcaggagaagagaagguagaaaaguuucgaaaaccuucgaaagaaucuuccacauuuccuguggagcugcuuaaacuagaauaaguaguugcuacuuuagaaaguguggccacuuggcuaccaauaguuaacaccugaggaguugcaggagggugagguccacucuuagguaggucuuccagagcacugucaaacuuugccuucuuuguauuaucggcuucagauucuuucaaauguucagucccagugaucugggcaaggauucggaaagagcgagacugaguuguuccaguccuuggacgccagucuucaguauccucaaucagucucuucuugcuggcaucacugugaguggguacaugauaaaacucuguauagcgcuccacaauguguuuucuuggugggcguuuaggugggauuuucccauuuugcuguuuacugucacccugggauccucuucucugucccucugcuagcuccugagaagucucggaacacacgcuggugacugugggcuuuugaacaggaaccggcucaggcuugggugcagcagaugcucuuugcagagucauauucaaagagccuguacaacccuuaaucuuauucugggcuucaagaugagucauuccuugugcauuuauuccaucaaugcugagaaccacaucgccuauucuuacauuugccugggcugccuugccgccaucuuuuagcagcagagggaggccugauccacuuccugagcucugagacugcucaauuaagucucucagggauucuccaggaggaauguaaguuucauccuguucuaacccaaugcuguaucgaggucugguuucuugucuuuuauaccggaaguaacaaaauaauaugauaaggaccaagagcaaacuacagacagucacagauauaaguaaagcccugugguguauagguccaucaacaaaaucucuguuuuucaauggaggcaguguaggguguaggucuuuauuacauucguuccuuucugugcagcauucaauugaucuucuuugaugaggaaugggagugucccgacacugaaaaucugagccuucuaguccuaggcaaccagaagugaccacaggcaacccagagucauccucuucuaucaucgugaaacaauauccgucugugcugcaaauauuguugacugagucuucuggacaauggugguggcauuuacaacgcaagaccuuuggacggggggugggggcuguacucucaccauccucuuucuuggugcccacauuuaauuuuccugcacuucgcaaaagcauguuaucaaggaaguuugcugaaagaagaaauagugagaguuaggcaucugugggguagacuaccccaguc

SEQ ID NO: 2457 - RNA, 1454 nt, Homo sapiens
ggagaaguauucaguuugcuacuuugugucaccccuugccauucuuuuauccccaguuaauuauuaucugcauauaauauaaaucugcuagaccauaaauuaacagcuuucaggacagaugccuugaaaguucuuagggagguuaaacaaauauuguagccuaaaaccuccucuauaacaaacaugcacacaauggaagugaugucguaagugagugauggggcaggaaggaccuagggcucugucucgacuauaaaaucaccuugccccaaacaaauuuaaauuauaacuuaggagguucauggacuuucauccauuacaggggcuuguccuucuuggagaaaaaggucugaccuuccaaacuuucacaacacacugagcauacaaagcaagugucaugccagguguagcccagagcuuccaggaacaugucaccagcuucuaugggaaauucacauccauggcauauaguaccaaagagggcauaauaaucagucucacaguaggguucaccauccuccaagugaaaaacauuguuccgaaugggcuuuccacaggcuacacacacaaaacaggaaacaugccaaguuuguuucaacgcacugaugacuucuccaaggaucuuccuuuggcaucgaccacauucaggggcaaagaauuucucauagcacagcucacaauacagggcuccuuucuccucuacaaauccaauguaggccauuguauuuuugcagugagcgcaguugaauucuucugggugccaagauuuccccagugccacuaagaaugguccucugaugaccugguuacaaugggcgcacaucggaguucguuucccugcuggaaugugcucagcucuuugcacuaaaguguccuggucacuuggcuggguuugucccaaagcugaguuggcuggugccacugauccugaguaaguagcgcuguuugagauucuuccaguggaagguacuccuugguuuggccguugccagcuuggugacuugaugacgccaguggauccuacaggcuugaaggcagcugcagcugugaggcugguaaccccuggucugccagagguugggcuguccaggcucucgggcaugcuccguguggaagcuaccgaggaagccaacugcggagaaggcuccugagaguuacugcaaauauuguugacugagucuucuggacaauggugguggcauuuacaacgcaagaccuuuggacggggggugggggcuguacucucaccauccucuuucuuggugcccacauuuaauuuuccugcacuucgcaaaagcauguuaucaaggaaguuuguuuugauuucuguacgcuugauauaugguugccaggcucccuaggaugagagacaugaggaggaggcacagaauugcuagggguuuccacuaaaaagcccagcaccguaggcagcacuaauccugcaccugugauau

SEQ ID NO: 2458 - RNA, 2425 nt, Homo sapiens
ugucagagaauuguuuauuuuacccaguuauacuguaauaaguccuggauggcacugugucuagccucaaggaaacagaacaaguacaaagcuaaguuaaaggcaacuuuauuacaauacuuuuccaaacuucaaaaugcauuuauuacuaaauuuagcucuaauauauaauacacuauauuacaaggcagaaagcauuucuggucauauauuuagcuuccauguauugcccaaaacacagcuuccuaggaauagcagcagugcacaguaguuuacgucacuaaguaaaauauuucucugaugucucacaaucauucauauuguaauuuauuuuauguucuucugauuaaaaaaagcaaagcuaucuuuuccauaucuuauuaguuaauaccuagaaauugucuauauucuaaaaauauccacuagagauauuuccuuugauaggaaauaggauuugcaaauccaaccaaaccaaagaauacuguauuucuccauugcaaauagggguaaaauucucuucuuuccuuuuucaggagccaaaucuggaccuccuccucuucauagagccauccugaauaguaccuacuuuaaaagauaccuaaaucuacaaugcacgcacucuucuuuaauaaagucuuuguuuauucuugccuccuuauauuuacuuauuuagaauaauuuacaaucaacuuugaauguaacauaauaaugaacuuaaaaaguaaucuugggagauguuaauaauauaaagaaaguauuuuccaaauuagacaaggacuuuauuugcucauuauccucugcuucaaccaaccaacuaaccaaauucaacuuaugaaaauaauucguuuuccaagauuacuacccuaaucacaacaaaaacagauacaaauccacaaauagaucuagucccuuaauuuucuauuuuuuuuuuuuuuugguuuuacauuugugagcuaccaacuagcacaaaacauguucaucuuccuuuucucacaacaauaggaaauuguuagaaaaguauagaaaaaguucuauuuuuucauaaggcaaauuuaauacagauuuugcuaugaaguugaaaaaaaaaaaguaaaugaaaagguaugugcuggcugcuuggggggcaaggcucauaaaucacuguacguuaagagcacgugcugaaacuucauggugccagucacguaauuuuguguauuugggacuaaagacgugaagggguaucuuuuccuuugccuucuuuguauuaucggcuucagauucuuucaaauguucagucccagugaucugggcaaggauucggaaagagcgagacugaguuguuccaguccuuggacgccagucuucaguauccucaaucagucucuucuugcuggcaucacugugaguggguacaugauaaaacucuguauagcgcuccacaauguguuuucuuggugggcguuuaggugggauuuucacagugccaggguuauuugucacuuguguuuucuuuugaacaggaaccggcucaggcuugggugcagcagaugcucuuugcagagucauauucaaagagccuguacaacccuuaaucuuauucugggcuucaagaugagucauuccuugugcauuuauuccaucaaugcugagaaccacaucgccuauucuuacauuugccugggcugccuugccgccaucuuuuagcagcagagggaggccugauccacuuccugagcucugagacugcucaauuaagucucucagggauucuccaggaggaauguaaguuucauccuguucuaacccaaugcuguaucgaggucugguuucuugucuuuuauaccggaaguaacaaaauaauaugauaaggaccaagagcaaacuacagacagucacagauauaaguaaagcccugugguguauagguccaucaacaaaaucucuguuuuucaauggaggcaguguaggguguaggucuuuauuacauucguuccuuucugugcagcauucaauugaucuucuuugaugaggaaugggagugucccgacacugaaaaucugagccuucuaguccuaggcaaccagaagugaccacaggcaacccagagucauccucuucuaucaucgugaaacaauauccgucugugcugcaaauauuguugacugagucuucuggacaauggugguggcauuuacaacgcaagaccuuuggacggggggugggggcuguacucucaccauccucuuucuuggugcccacauuuaauuuuccugcacuucgcaaaagcauguuaucaaggaaguuuguuuugauuucuguacgcuugauauaugguugccaggcucccuaggaugagagacaugaggaggaggcacagaauugcuagggguuuccacuaaaaagcccagcaccguaggcagcacuaauccugcaccugugauau

SEQ ID NO: 2459 - RNA, 2067 nt, Homo sapiens
ggagaaguauucaguuugcuacuuugugucaccccuugccauucuuuuauccccaguuaauuauuaucugcauauaauauaaaucugcuagaccauaaauuaacagcuuucaggacagaugccuugaaaguucuuagggagguuaaacaaauauuguagccuaaaaccuccucuauaacaaacaugcacacaauggaagugaugucguaagugagugauggggcaggaaggaccuagggcucugucucgacuauaaaaucaccuugccccaaacaaauuuaaauuauaacuuaggagguucauggacuuucauccauuacaggggcuuguccuucuuggagaaaaaggucugaccuuccaaacuuucacaacacacugagcauacaaagcaagugucaugccagguguagcccagagcuuccaggaacaugucaccagcuucuaugggaaauucacauccauggcauauaguaccaaagagggcauaauaaucagucucacaguaggguucaccauccuccaagugaaaaacauuguuccgaaugggcuuuccacaggcuacacacacaaaacaggaaacaugccaaguuuguuucaacgcacugaugacuucuccaaggaucuuccuuuggcaucgaccacauucaggggcaaagaauuucucauagcacagcucacaauacagggcuccuuucuccucuacaaauccaauguaggccauuguauuuuugcagugagcgcaguugaauucuucugggugccaagauuuccccagugccacuaagaaugguccucugaugaccugguuacaaugggcgcacaucggaguucguuucccugcuggaaugugcucagcucuuugcacuaaaguguccuggucacuuggcuggguuugucccaaagcugaguuggcuggugccacugauccugaguaaguagcgcuguuugagauucuuccaguggaagguacuccuugguuuggccguugccagcuuggugacuugaugacgccaguggauccuacaggcuugaaggcagcugcagcugugaggcugguaaccccuggucugccagagguugggcuguccaggcucucgggcaugcuccguguggaagcuaccgaggaagccaacugcggagaaggcuccugagaguuauuugccuucuuuguauuaucggcuucagauucuuucaaauguucagucccagugaucugggcaaggauucggaaagagcgagacugaguuguuccaguccuuggacgccagucuucaguauccucaaucagucucuucuugcuggcaucacugugaguggguacaugauaaaacucuguauagcgcuccacaauguguuuucuuggugggcguuuaggugggauuuucccauuuugcuguuuacugucacccugggauccucuucucugucccucugcuagcuccugagaagucucggaacacacgcuggugacugugggcuuuugaacaggaaccggcucaggcuugggugcagcagaugcucuuugcagagucauauucaaagagccuguacaacccuuaaucuuauucugggcuucaagaugagucauuccuugugcauuuauuccaucaaugcugagaaccacaucgccuauucuuacauuugccugggcugccuugccgccaucuuuuagacuagagauugucagaggcauguugaaauccuuaccgcccugcagccggaaaccccaaggagcugggccaaccagugacacacuguaguugcucaugguucuaauggcucaaaguccaaugacagaaaaugaaauaugcuucucacuuauggcaggcuugcuuguuuaacuuuuuguuuccucucuugucauagcucagagccaaaugguuaugaaucagcagaagucugaaccuuuaucaacaaggcaugaaaugaucuuccuuuccuuucacaucuaagaaagaguaggcugaacuccaccccgcggcugcgcucccggcucccgcguccucagcgccgcggucuccgcacugcccggcgucccgcgaggccccgccgacuccgcgccccgcg

SEQ ID NO: 2460 - skipped

SEQ ID NO: 2461 - RNA, 7052 nt, Homo sapiens
ucauuuacaacaaugcagucauuuauuuauugaguaugugcacauuaugguauuauuacuauacugauuauauuuaucaugugacuucuaauuagaaaauguauccaaaagcaaaacagcagauauacaaaauuaaagagacagaagauagacauuaacagauaaggcaacuuauacauugagaauccaaauccaauacauuuaaacauuugggaaaugagggggacaaauggaagccagaucaaauuuguguaaaacuauucaguauguuucccuugcuucaugucugagaaggcucucccuucaauggggaugacaaacuccaaaugccacacaaauguuaacagaauacuagauucacacuggaacggggguaaagaagaaauuauuuucuauaaaagggcuccuaauguaguacugcuugaaaaugguacauuuuuguuguagauuauuuuaaacauaaugcuauaguaauauuuugaagauuugagcuguuauuuccauuuguuuuuacacugugacuaaaugauuagguuuuaguuuuagacucuaaacggaaccugaauuaauaggaaauaaacacgguacuauaguuguccuauggugccccuaugggugauggguuccaagaacccccuaggauacuaaaguccaugauguucaagucccuuauagaaaaugguguaguauuugcauauaaccuaugcacauccuaccauacacuuuaaaucaucucuagauuaccuauaauagcuaauacaauguaaaugcuuuguaaauaguuguuauacuauauuguuuaaugacaaaaaaaaguuuguacauguucagcaaaggcgcaaccauccauuuuuuuccccaaauauuuuugacccacagugggcugaaucacagaugcgaagccuauggacauggagggccaacuggacaagcauaagcaggggauacuuuuuagguugcuacuucagcaggcaacauucagaccauggaagucuagagaaagauuauaaaucugaacuuaccgcuaaaaauuuuaaaaugggaaauaaauccaaggaguuuuuagucaugcauuaugauuuuaaucuauguuaugccaaguacagcauuccaaaauauacaucuagagacuaaaaguaaaugcucuauagugaagaaguaauaauuaaaaaaugcuacuaauauagaaaauuuauaaucagaaaaauaaauauucagggagcucaccagaagaauaaagugcucugccaguuauuaaaggauuacugcuggugaauuaaauauggcauuccccaagggaaacagagagauucuucuggauuauguucaauauuuauuucacaggauuaacuguuuuaggaacagauauaaagcuucgccacggaagagauggacaaagcacaaagacaacaugauaccuuaggaagcaacacuacccuuucaggcauaaaauuuggagaaaugcaacauuaugcuucaugaauaauauguagaaagaaggucugaugaaaaugacauccuuaauguaagauaacuuuauaagaaaucugggucaaauaaaauucuuugaagaaaacauccaaaugucauugacuuaucaaauacuaucuuggcauauaaccuaugaaggcaaaacuaaacaaacaaacaaaaagcucacaccaaacaaaaccaucaacuuauuuuguauucuauaacauacaagacuguaaagaugugacaguguacauuauaugacaaugcacauuagccagcaagucuuuuauaggugguuucagcagcaacgauaaauaaugcagaauucagcuccagcacuuuauuucaaaagaaauuuccugccucccuccaagaugcagggugaggagguagcuugggguugcuauuggagaaguauucaguuugcuacuuugugucaccccuugccauucuuuuauccccaguuaauuauuaucugcauauaauauaaaucugcuagaccauaaauuaacagcuuucaggacagaugccuugaaaguucuuagggagguuaaacaaauauuguagccuaaaaccuccucuauaacaaacaugcacacaauggaagugaugucguaagugagugauggggcaggaaggaccuagggcucugucucgacuauaaaaucaccuugccccaaacaaauuuaaauuauaacuuaggagguucauggacuuucauccauucuggaaacaaagagaaaaaccaaaucaaauaccagaaucuguuuucucacugggcaaauagcaacaggauccacaguuuuaccacaauuguuucccugucuccaugugguaucuacauaauucuuuucccaaaggaggaaaucaaauaacaggccaaucugaguaauuaaacuccccucccaacacuacccaaccucugugaauaaaagcuuuccaaacuuugugaucacauuugaaauugguucacuuauuauugagagaaaaccacaaaaagucucaauuucaucacauccucaaaccaaucuuuuaauuuuuaaaugcagaagaagaaacaaaacgaaacaaaaagaucauucugcaaagagaccucucaacucuucaucagccaguggcauaacucagaaacugauuuaacuaauuuauuauuugagaaaaggggauugaaaaacaauugggggguauaaucuucugauucacaauucccagccacauucuuuucuauuuauucucucucucucuuuuuuuuuuuuuuuuuuuuuuuuuaagagccggagucuugcucugucaccaggcuggagugcaguggugugaucucagcucacugcaacuuccgucuccuggguucaagaauuuuccugccucagccucccaaguacaugggacuacaggcacgccccaccaugcccagcucauuuuuguauuuuuaguagagacaggguuucaccauguuggccaggaugaucuugaucucuugaccucaugauccgcccgucuuggccucccaaagugcugggaucacaggcgugagccaccacaccuggcccucuauuuauucucuuuaaagagagagaaaacuaugagaggccaaaauuauuuaauuaaaucuuuaccuuagcacaagggaaaaaaauggaauuugccuaauauaggugaugaagcauacacaaugaauagaaacaaucacauuuuaguaaaaggcaaaaauuugagacuuauaagcuauaugguagcuuauuuuuggguggggaagaaaugagaaaagaauauaacaucucuuacuggcaugacacauuuugauaaaaaaucuuauuguccuuuccuacuagaaugauccacuguaaggcaaaaauaauauacaagcaaaguuuuuuuuuggagacagagucucacucugucacccaggcuggagugcagugguacgaucuuggcucacugcaaccucucccucccggguucaagugauucucgugccucagccucuugaguagcugggauuacaggcgcgugccacugcguccggcuaauuuuuguauuuuuaguagagaugggguuucaccauguuggccaggcugaucucaaacuccugaccucaugugguccacccaccuuggccucccaaagugcugggauuacaggcgugagccaccgcgcucagccuacaagcaauuuuuuaaaaacugacaccuauuacugauaaaauucucuguuuaaaauccuauuuacuauuuuaaagauaaguauuaguuuuuuuuuaaauacaauaauucuguuauugauaaaauuuaaggcauuuucauugccuuuugcagauuuacucauaacuaccuaacaaggaaagaagguauaauuauuucagauuggauuauuuauucuaaaauuaaauucuucacuaauuuauucuaagaugaauuuaauaguccaucaggaaauugguuuuuauaaagcuuauuuuaugggcauaaaauacaggaaaaaguaauaauaaaugccaaaccgucucuuuacuuuaugaagccaaauauuuccucagacuugguuuuuaaagcuggaauuuauuccuucagggccacuauuauuuuucaaaacuccauauaaauauugaaucuaaaaauuaauuaguaauuuuaauuuuccuuuuucucuucaaauuccuucucuucuccugaacuguugacuuucaaaaauucacagaaugagcauguuucuuacacaggggcuuguccuucuuggagaaaaaggucugaccuuccaaacuuucacaacacacugagcauacaaagcaagugucaugccagguguagcccagagcuuccaggaacaugucaccagcuucuaugggaaauucacauccauggcauauaguaccaaagagggcauaauaaucagucucacaguaggguucaccauccuccaagugaaaaacauuguuccgaaugggcuuuccacaggcuacacacacaaaacaggaaacaugccaaguuuguuucaacgcacugaugacuucuccaaggaucuuccuuuggcaucgaccacauucaggggcaaagaauuucucauagcacagcucacaauacagggcuccuuucuccucuacaaauccaauguaggccauuguauuuuugcagugagcgcaguugaauucuucugggugccaagauuuccccagugccacuaagaaugguccucugaugaccugguuacaaugggcgcacaucggaguucguuucccugcuggaaugugcucagcucuuugcacuaaaguguccuggucacuuggcuggguuugucccaaagcugaguuggcuggugccacugauccugaguaaguagcgcuguuugagauucuuccaguggaagguacuccuugguuuggccguugccagcuuggugacuugaugacgccaguggauccuacaggcuugaaggcagcugcagcugugaggcugguaaccccuggucugccagagguugggcuguccaggcucucgggcaugcuccguguggaagcuaccgaggaagccaacugcggagaaggcuccugagaguuauuugccuucuuuguauuaucggcuucagauucuuucaaauguucagucccagugaucugggcaaggauucggaaagagcgagacugaguuguuccaguccuuggacgccagucuucaguauccucaaucagucucuucuugcuggcaucacugugaguggguacaugauaaaacucuguauagcgcuccacaauguguuuucuuggugggccauuuugcuguuuacugucacccugggauccucuucucugucccucugcuagcuccugagaagucucggaacacacgcuggugacugugggcugccgugggacauuaacugcaguuuuaccagcgcucagugcagauggagacuggucagcacuaagauuggcauuagcaugcaguccagaugcagcgaacaggggaggagugacggcagccacgggugaaggggaagcaugugaugagguggucgcaugggcuggggugaaggcagacgauggugaugggauggaugugacuuuuggugaagacacagaaccaaaaggccguggugccuuauuguaggccauguuguuuguggaagugacuuuggacacagcaggagauguaaugggcacagguuuaacuacuucuuuagguucucccuuuugaacaggaaccggcucaggcuugggugcagcagaugcucuaauaaauuuaacagccaggcccaggucagcaauacagcaaguuccauuuuucuucaccagaauguuuuuacuuuucagaucucgaugggcaauugcugguuugccuugaguacuaaagauuucuguguguaaaugacauaagccacugacagaagaguaggcuaacuucagcauugauuuagcgucuagggugguggacuucagauaaucauaaagggaaccauuuucaugauagucugugauuagguacaacuggguccaggacccugucccuuugauaucugcagcaaugaaacccaaaauguuuucaugccucaucaacacugucugauauauuucugucucucugaaccagcuggcuuccucuguggugaagaacacuuucacagcuaccuuuucgccacgccacuuucccauccaaacuuccccauagcgaccuuuuccaaucuguuucaccaucugaaucugcuuagcuauaguccuuuggaccagcagagggaggccugauccacuuccugagcucugagacugcucaauuaagucucucagggauucuccaggaggaauguaaguuucauccuguucuaacccaaugcuguaucgaggucugguuucuugucuuuuauaccggaaguaacaaaauaauaugauaaggaccaagagcaaacuacagacagucacagauauaaguaaagcccugugguguauagguccaucaacaaaaucucuguuuuucaauggaggcaguguaggguguaggucuuuauuacauucguuccuuucugugcagcauucaauugaucuucuuugaugaggaaugggagugucccgacacugaaaaucugagccuucuaguccuaggcaaccagaagugaccacaggcaacccagagucauccucuucuaucaucgugaaacaauauccgucugugcugcaaauauuguugacugagucuucuggacaauggugguggcauuuacaacgcaagaccuuuggacggggggugggggcuguacucucaccauccucuuucuuggugcccacauuuaauuuuccugcacuucgcaaaagcauguuaucaaggaaguuugcuucucacuuauggcaggcuugcuuguuuaacuuuuuguuuccucucuugucauagcucagagccaaaugguuaugaaucagcagaagucugaaccuuuaucaacaaggcaugaaaugaucuuccuuuccuuucacaucuaagaaagaguaggcugaacuccaccccgcggcugcgcucccggcucccgcguccucagcgccgcggucuccgcacugcccggcgucccgcgaggccccgccgacuccgcgccccgcg

SEQ ID NO: 2462 - RNA, 6713 nt, Homo sapiens
ucauuuacaacaaugcagucauuuauuuauugaguaugugcacauuaugguauuauuacuauacugauuauauuuaucaugugacuucuaauuagaaaauguauccaaaagcaaaacagcagauauacaaaauuaaagagacagaagauagacauuaacagauaaggcaacuuauacauugagaauccaaauccaauacauuuaaacauuugggaaaugagggggacaaauggaagccagaucaaauuuguguaaaacuauucaguauguuucccuugcuucaugucugagaaggcucucccuucaauggggaugacaaacuccaaaugccacacaaauguuaacagaauacuagauucacacuggaacggggguaaagaagaaauuauuuucuauaaaagggcuccuaauguaguacugcuugaaaaugguacauuuuuguuguagauuauuuuaaacauaaugcuauaguaauauuuugaagauuugagcuguuauuuccauuuguuuuuacacugugacuaaaugauuagguuuuaguuuuagacucuaaacggaaccugaauuaauaggaaauaaacacgguacuauaguuguccuauggugccccuaugggugauggguuccaagaacccccuaggauacuaaaguccaugauguucaagucccuuauagaaaaugguguaguauuugcauauaaccuaugcacauccuaccauacacuuuaaaucaucucuagauuaccuauaauagcuaauacaauguaaaugcuuuguaaauaguuguuauacuauauuguuuaaugacaaaaaaaaguuuguacauguucagcaaaggcgcaaccauccauuuuuuuccccaaauauuuuugacccacagugggcugaaucacagaugcgaagccuauggacauggagggccaacuggacaagcauaagcaggggauacuuuuuagguugcuacuucagcaggcaacauucagaccauggaagucuagagaaagauuauaaaucugaacuuaccgcuaaaaauuuuaaaaugggaaauaaauccaaggaguuuuuagucaugcauuaugauuuuaaucuauguuaugccaaguacagcauuccaaaauauacaucuagagacuaaaaguaaaugcucuauagugaagaaguaauaauuaaaaaaugcuacuaauauagaaaauuuauaaucagaaaaauaaauauucagggagcucaccagaagaauaaagugcucugccaguuauuaaaggauuacugcuggugaauuaaauauggcauuccccaagggaaacagagagauucuucuggauuauguucaauauuuauuucacaggauuaacuguuuuaggaacagauauaaagcuucgccacggaagagauggacaaagcacaaagacaacaugauaccuuaggaagcaacacuacccuuucaggcauaaaauuuggagaaaugcaacauuaugcuucaugaauaauauguagaaagaaggucugaugaaaaugacauccuuaauguaagauaacuuuauaagaaaucugggucaaauaaaauucuuugaagaaaacauccaaaugucauugacuuaucaaauacuaucuuggcauauaaccuaugaaggcaaaacuaaacaaacaaacaaaaagcucacaccaaacaaaaccaucaacuuauuuuguauucuauaacauacaagacuguaaagaugugacaguguacauuauaugacaaugcacauuagccagcaagucuuuuauaggugguuucagcagcaacgauaaauaaugcagaauucagcuccagcacuuuauuucaaaagaaauuuccugccucccuccaagaugcagggugaggagguagcuugggguugcuauuggagaaguauucaguuugcuacuuugugucaccccuugccauucuuuuauccccaguuaauuauuaucugcauauaauauaaaucugcuagaccauaaauuaacagcuuucaggacagaugccuugaaaguucuuagggagguuaaacaaauauuguagccuaaaaccuccucuauaacaaacaugcacacaauggaagugaugucguaagugagugauggggcaggaaggaccuagggcucugucucgacuauaaaaucaccuugccccaaacaaauuuaaauuauaacuuaggagguucauggacuuucauccauucuggaaacaaagagaaaaaccaaaucaaauaccagaaucuguuuucucacugggcaaauagcaacaggauccacaguuuuaccacaauuguuucccugucuccaugugguaucuacauaauucuuuucccaaaggaggaaaucaaauaacaggccaaucugaguaauuaaacuccccucccaacacuacccaaccucugugaauaaaagcuuuccaaacuuugugaucacauuugaaauugguucacuuauuauugagagaaaaccacaaaaagucucaauuucaucacauccucaaaccaaucuuuuaauuuuuaaaugcagaagaagaaacaaaacgaaacaaaaagaucauucugcaaagagaccucucaacucuucaucagccaguggcauaacucagaaacugauuuaacuaauuuauuauuugagaaaaggggauugaaaaacaauugggggguauaaucuucugauucacaauucccagccacauucuuuucuauuuauucucucucucucuuuuuuuuuuuuuuuuuuuuuuuuuaagagccggagucuugcucugucaccaggcuggagugcaguggugugaucucagcucacugcaacuuccgucuccuggguucaagaauuuuccugccucagccucccaaguacaugggacuacaggcacgccccaccaugcccagcucauuuuuguauuuuuaguagagacaggguuucaccauguuggccaggaugaucuugaucucuugaccucaugauccgcccgucuuggccucccaaagugcugggaucacaggcgugagccaccacaccuggcccucuauuuauucucuuuaaagagagagaaaacuaugagaggccaaaauuauuuaauuaaaucuuuaccuuagcacaagggaaaaaaauggaauuugccuaauauaggugaugaagcauacacaaugaauagaaacaaucacauuuuaguaaaaggcaaaaauuugagacuuauaagcuauaugguagcuuauuuuuggguggggaagaaaugagaaaagaauauaacaucucuuacuggcaugacacauuuugauaaaaaaucuuauuguccuuuccuacuagaaugauccacuguaaggcaaaaauaauauacaagcaaaguuuuuuuuuggagacagagucucacucugucacccaggcuggagugcagugguacgaucuuggcucacugcaaccucucccucccggguucaagugauucucgugccucagccucuugaguagcugggauuacaggcgcgugccacugcguccggcuaauuuuuguauuuuuaguagagaugggguuucaccauguuggccaggcugaucucaaacuccugaccucaugugguccacccaccuuggccucccaaagugcugggauuacaggcgugagccaccgcgcucagccuacaagcaauuuuuuaaaaacugacaccuauuacugauaaaauucucuguuuaaaauccuauuuacuauuuuaaagauaaguauuaguuuuuuuuuaaauacaauaauucuguuauugauaaaauuuaaggcauuuucauugccuuuugcagauuuacucauaacuaccuaacaaggaaagaagguauaauuauuucagauuggauuauuuauucuaaaauuaaauucuucacuaauuuauucuaagaugaauuuaauaguccaucaggaaauugguuuuuauaaagcuuauuuuaugggcauaaaauacaggaaaaaguaauaauaaaugccaaaccgucucuuuacuuuaugaagccaaauauuuccucagacuugguuuuuaaagcuggaauuuauuccuucagggccacuauuauuuuucaaaacuccauauaaauauugaaucuaaaaauuaauuaguaauuuuaauuuuccuuuuucucuucaaauuccuucucuucuccugaacuguugacuuucaaaaauucacagaaugagcauguuucuuacacaggggcuuguccuucuuggagaaaaaggucugaccuuccaaacuuucacaacacacugagcauacaaagcaagugucaugccagguguagcccagagcuuccaggaacaugucaccagcuucuaugggaaauucacauccauggcauauaguaccaaagagggcauaauaaucagucucacaguaggguucaccauccuccaagugaaaaacauuguuccgaaugggcuuuccacaggcuacacacacaaaacaggaaacaugccaaguuuguuucaacgcacugaugacuucuccaaggaucuuccuuuggcaucgaccacauucaggggcaaagaauuucucauagcacagcucacaauacagggcuccuuucuccucuacaaauccaauguaggccauuguauuuuugcagugagcgcaguugaauucuucugggugccaagauuuccccagugccacuaagaaugguccucugaugaccugguuacaaugggcgcacaucggaguucguuucccugcuggaaugugcucagcucuuugcacuaaaguguccuggucacuuggcuggguuugucccaaagcugaguuggcuggugccacugauccugaguaaguagcgcuguuugagauucuuccaguggaagguacuccuugguuuggccguugccagcuuggugacuugaugacgccaguggauccuacaggcuugaaggcagcugcagcugugaggcugguaaccccuggucugccagagguugggcuguccaggcucucgggcaugcuccguguggaagcuaccgaggaagccaacugcggagaaggcuccugagaguuauuugccuucuuuguauuaucggcuucagauucuuucaaauguucagucccagugaucugggcaaggauucggaaagagcgagacugaguuguuccaguccuuggacgccagucuucaguauccucaaucagucucuucuugcuggcaucacugugaguggguacaugauaaaacucuguauagcgcuccacaauguguuuucuuggugggccauuuugcuguuuacugucacccugggauccucuucucugucccucugcuagcuccugagaagucucggaacacacgcuggugacugugggcugccgugggacauuaacugcaguuuuaccagcgcucagugcagauggagacuggucagcacuaagauuggcauuagcaugcaguccagaugcagcgaacaggggaggagugacggcagccacgggugaaggggaagcaugugaugagguggucgcaugggcuggggugaaggcagacgauggugaugggauggaugugacuuuuggugaagacacagaaccaaaaggccguggugccuuauuguaggccauguuguuuguggaagugacuuuggacacagcaggagauguaaugggcacagguuuaacuacuucuuuagguucucccuuuugaacaggaaccggcucaggcuugggugcagcagaugcucuuugcagagucauauucaaagagccuguacaacccuuaaucuuauucugggcuucaagaugagucauuccuugugcauuuauuccaucaaugcugagaaccacaucgccuauucuuacauuugccugggcugccuugccgccaucuuuuagcagcagagggaggccugauccacuuccugagcucugagacugcucaauuaagucucucagggauucuccaggaggaauguaaguuucauccuguucuaacccaaugcuguaucgaggucugguuucuugucuuuuauaccggaaguaacaaaauaauaugauaaggaccaagagcaaacuacagacagucacagauauaaguaaagcccugugguguauagguccaucaacaaaaucucuguuuuucaauggaggcaguguaggguguaggucuuuauuacauucguuccuuucugugcagcauucaauugaucuucuuugaugaggaaugggagugucccgacacugaaaaucugagccuucuaguccuaggcaaccagaagugaccacaggcaacccagagucauccucuucuaucaucgugaaacaauauccgucugugcugcaaauauuguugacugagucuucuggacaauggugguggcauuuacaacgcaagaccuuuggacggggggugggggcuguacucucaccauccucuuucuuggugcccacauuuaauuuuccugcacuucgcaaaagcauguuaucaaggaaguuugcuucucacuuauggcaggcuugcuuguuuaacuuuuuguuuccucucuugucauagcucagagccaaaugguuaugaaucagcagaagucugaaccuuuaucaacaaggcaugaaaugaucuuccuuuccuuucacaucuaagaaagaguaggcugaacuccaccccgcggcugcgcucccggcucccgcguccucagcgccgcggucuccgcacugcccggcgucccgcgaggccccgccgacuccgcgccccgcg

SEQ ID NO: 2463 - RNA, 5864 nt, Homo sapiens
ucauuuacaacaaugcagucauuuauuuauugaguaugugcacauuaugguauuauuacuauacugauuauauuuaucaugugacuucuaauuagaaaauguauccaaaagcaaaacagcagauauacaaaauuaaagagacagaagauagacauuaacagauaaggcaacuuauacauugagaauccaaauccaauacauuuaaacauuugggaaaugagggggacaaauggaagccagaucaaauuuguguaaaacuauucaguauguuucccuugcuucaugucugagaaggcucucccuucaauggggaugacaaacuccaaaugccacacaaauguuaacagaauacuagauucacacuggaacggggguaaagaagaaauuauuuucuauaaaagggcuccuaauguaguacugcuugaaaaugguacauuuuuguuguagauuauuuuaaacauaaugcuauaguaauauuuugaagauuugagcuguuauuuccauuuguuuuuacacugugacuaaaugauuagguuuuaguuuuagacucuaaacggaaccugaauuaauaggaaauaaacacgguacuauaguuguccuauggugccccuaugggugauggguuccaagaacccccuaggauacuaaaguccaugauguucaagucccuuauagaaaaugguguaguauuugcauauaaccuaugcacauccuaccauacacuuuaaaucaucucuagauuaccuauaauagcuaauacaauguaaaugcuuuguaaauaguuguuauacuauauuguuuaaugacaaaaaaaaguuuguacauguucagcaaaggcgcaaccauccauuuuuuuccccaaauauuuuugacccacagugggcugaaucacagaugcgaagccuauggacauggagggccaacuggacaagcauaagcaggggauacuuuuuagguugcuacuucagcaggcaacauucagaccauggaagucuagagaaagauuauaaaucugaacuuaccgcuaaaaauuuuaaaaugggaaauaaauccaaggaguuuuuagucaugcauuaugauuuuaaucuauguuaugccaaguacagcauuccaaaauauacaucuagagacuaaaaguaaaugcucuauagugaagaaguaauaauuaaaaaaugcuacuaauauagaaaauuuauaaucagaaaaauaaauauucagggagcucaccagaagaauaaagugcucugccaguuauuaaaggauuacugcuggugaauuaaauauggcauuccccaagggaaacagagagauucuucuggauuauguucaauauuuauuucacaggauuaacuguuuuaggaacagauauaaagcuucgccacggaagagauggacaaagcacaaagacaacaugauaccuuaggaagcaacacuacccuuucaggcauaaaauuuggagaaaugcaacauuaugcuucaugaauaauauguagaaagaaggucugaugaaaaugacauccuuaauguaagauaacuuuauaagaaaucugggucaaauaaaauucuuugaagaaaacauccaaaugucauugacuuaucaaauacuaucuuggcauauaaccuaugaaggcaaaacuaaacaaacaaacaaaaagcucacaccaaacaaaaccaucaacuuauuuuguauucuauaacauacaagacuguaaagaugugacaguguacauuauaugacaaugcacauuagccagcaagucuuuuauaggugguuucagcagcaacgauaaauaaugcagaauucagcuccagcacuuuauuucaaaagaaauuuccugccucccuccaagaugcagggugaggagguagcuugggguugcuauuggagaaguauucaguuugcuacuuugugucaccccuugccauucuuuuauccccaguuaauuauuaucugcauauaauauaaaucugcuagaccauaaauuaacagcuuucaggacagaugccuugaaaguucuuagggagguuaaacaaauauuguagccuaaaaccuccucuauaacaaacaugcacacaauggaagugaugucguaagugagugauggggcaggaaggaccuagggcucugucucgacuauaaaaucaccuugccccaaacaaauuuaaauuauaacuuaggagguucauggacuuucauccauucuggaaacaaagagaaaaaccaaaucaaauaccagaaucuguuuucucacugggcaaauagcaacaggauccacaguuuuaccacaauuguuucccugucuccaugugguaucuacauaauucuuuucccaaaggaggaaaucaaauaacaggccaaucugaguaauuaaacuccccucccaacacuacccaaccucugugaauaaaagcuuuccaaacuuugugaucacauuugaaauugguucacuuauuauugagagaaaaccacaaaaagucucaauuucaucacauccucaaaccaaucuuuuaauuuuuaaaugcagaagaagaaacaaaacgaaacaaaaagaucauucugcaaagagaccucucaacucuucaucagccaguggcauaacucagaaacugauuuaacuaauuuauuauuugagaaaaggggauugaaaaacaauugggggguauaaucuucugauucacaauucccagccacauucuuuucuauuuauucucucucucucuuuuuuuuuuuuuuuuuuuuuuuuuaagagccggagucuugcucugucaccaggcuggagugcaguggugugaucucagcucacugcaacuuccgucuccuggguucaagaauuuuccugccucagccucccaaguacaugggacuacaggcacgccccaccaugcccagcucauuuuuguauuuuuaguagagacaggguuucaccauguuggccaggaugaucuugaucucuugaccucaugauccgcccgucuuggccucccaaagugcugggaucacaggcgugagccaccacaccuggcccucuauuuauucucuuuaaagagagagaaaacuaugagaggccaaaauuauuuaauuaaaucuuuaccuuagcacaagggaaaaaaauggaauuugccuaauauaggugaugaagcauacacaaugaauagaaacaaucacauuuuaguaaaaggcaaaaauuugagacuuauaagcuauaugguagcuuauuuuuggguggggaagaaaugagaaaagaauauaacaucucuuacuggcaugacacauuuugauaaaaaaucuuauuguccuuuccuacuagaaugauccacuguaaggcaaaaauaauauacaagcaaaguuuuuuuuuggagacagagucucacucugucacccaggcuggagugcagugguacgaucuuggcucacugcaaccucucccucccggguucaagugauucucgugccucagccucuugaguagcugggauuacaggcgcgugccacugcguccggcuaauuuuuguauuuuuaguagagaugggguuucaccauguuggccaggcugaucucaaacuccugaccucaugugguccacccaccuuggccucccaaagugcugggauuacaggcgugagccaccgcgcucagccuacaagcaauuuuuuaaaaacugacaccuauuacugauaaaauucucuguuuaaaauccuauuuacuauuuuaaagauaaguauuaguuuuuuuuuaaauacaauaauucuguuauugauaaaauuuaaggcauuuucauugccuuuugcagauuuacucauaacuaccuaacaaggaaagaagguauaauuauuucagauuggauuauuuauucuaaaauuaaauucuucacuaauuuauucuaagaugaauuuaauaguccaucaggaaauugguuuuuauaaagcuuauuuuaugggcauaaaauacaggaaaaaguaauaauaaaugccaaaccgucucuuuacuuuaugaagccaaauauuuccucagacuugguuuuuaaagcuggaauuuauuccuucagggccacuauuauuuuucaaaacuccauauaaauauugaaucuaaaaauuaauuaguaauuuuaauuuuccuuuuucucuucaaauuccuucucuucuccugaacuguugacuuucaaaaauucacagaaugagcauguuucuuacacaggggcuuguccuucuuggagaaaaaggucugaccuuccaaacuuucacaacacacugagcauacaaagcaagugucaugccagguguagcccagagcuuccaggaacaugucaccagcuucuaugggaaauucacauccauggcauauaguaccaaagagggcauaauaaucagucucacaguaggguucaccauccuccaagugaaaaacauuguuccgaaugggcuuuccacaggcuacacacacaaaacaggaaacaugccaaguuuguuucaacgcacugaugacuucuccaaggaucuuccuuuggcaucgaccacauucaggggcaaagaauuucucauagcacagcucacaauacagggcuccuuucuccucuacaaauccaauguaggccauuguauuuuugcagugagcgcaguugaauucuucugggugccaagauuuccccagugccacuaagaaugguccucugaugaccugguuacaaugggcgcacaucggaguucguuucccugcuggaaugugcucagcucuuugcacuaaaguguccuggucacuuggcuggguuugucccaaagcugaguuggcuggugccacugauccugaguaaguagcgcuguuugagauucuuccaguggaagguacuccuugguuuggccguugccagcuuggugacuugaugacgccaguggauccuacaggcuugaaggcagcugcagcugugaggcugguaaccccuggucugccagagguugggcuguccaggcucucgggcaugcuccguguggaagcuaccgaggaagccaacugcggagaaggcuccugagaguuauuugccuucuuuguauuaucggcuucagauucuuucaaauguucagucccagugaucugggcaaggauucggaaagagcgagacugaguuguuccaguccuuggacgccagucuucaguauccucaaucagucucuucuugcuggcaucacugugaguggguacaugauaaaacucuguauagcgcuccacaauguguuuucuuggugggccauuuugcuguuuacugucacccugggauccucuucucugucccucugcuagcuccugagaagucucggaacacacgcuggugacugugggcugccgugggacauuaacugcaguuuuaccagcgcucagugcagauggagacuggucagcacuaagauuggcauuagcaugcaguccagaugcagcgaacaggggaggagugacggcagccacgggugaaggggaagcaugugaugagguggucgcaugggcuggggugaaggcagacgauggugaugggauggaugugacuuuuggugaagacacagaaccaaaaggccguggugccuuauuguaggccauguuguuuguggaagugacuuuggacacagcaggagauguaaugggcacagguuuaacuacuucuuuagguucucccuuuugaacaggaaccggcucaggcuugggugcagcagaugcucuuuaucaacaaggcaugaaaugaucuuccuuuccuuucacaucuaagaaagaguaggcugaacuccaccccgcggcugcgcucccggcucccgcguccucagcgccgcggucuccgcacugcccggcgucccgcgaggccccgccgacuccgcgccccgcg

SEQ ID NO: 2464 - RNA, 2605 nt, Homo sapiens
ugucagagaauuguuuauuuuacccaguuauacuguaauaaguccuggauggcacugugucuagccucaaggaaacagaacaaguacaaagcuaaguuaaaggcaacuuuauuacaauacuuuuccaaacuucaaaaugcauuuauuacuaaauuuagcucuaauauauaauacacuauauuacaaggcagaaagcauuucuggucauauauuuagcuuccauguauugcccaaaacacagcuuccuaggaauagcagcagugcacaguaguuuacgucacuaaguaaaauauuucucugaugucucacaaucauucauauuguaauuuauuuuauguucuucugauuaaaaaaagcaaagcuaucuuuuccauaucuuauuaguuaauaccuagaaauugucuauauucuaaaaauauccacuagagauauuuccuuugauaggaaauaggauuugcaaauccaaccaaaccaaagaauacuguauuucuccauugcaaauagggguaaaauucucuucuuuccuuuuucaggagccaaaucuggaccuccuccucuucauagagccauccugaauaguaccuacuuuaaaagauaccuaaaucuacaaugcacgcacucuucuuuaauaaagucuuuguuuauucuugccuccuuauauuuacuuauuuagaauaauuuacaaucaacuuugaauguaacauaauaaugaacuuaaaaaguaaucuugggagauguuaauaauauaaagaaaguauuuuccaaauuagacaaggacuuuauuugcucauuauccucugcuucaaccaaccaacuaaccaaauucaacuuaugaaaauaauucguuuuccaagauuacuacccuaaucacaacaaaaacagauacaaauccacaaauagaucuagucccuuaauuuucuauuuuuuuuuuuuuuugguuuuacauuugugagcuaccaacuagcacaaaacauguucaucuuccuuuucucacaacaauaggaaauuguuagaaaaguauagaaaaaguucuauuuuuucauaaggcaaauuuaauacagauuuugcuaugaaguugaaaaaaaaaaaguaaaugaaaagguaugugcuggcugcuuggggggcaaggcucauaaaucacuguacguuaagagcacgugcugaaacuucauggugccagucacguaauuuuguguauuugggacuaaagacgugaagggguaucuuuuccuuugccuucuuuguauuaucggcuucagauucuuucaaauguucagucccagugaucugggcaaggauucggaaagagcgagacugaguuguuccaguccuuggacgccagucuucaguauccucaaucagucucuucuugcuggcaucacugugaguggguacaugauaaaacucuguauagcgcuccacaauguguuuucuuggugggcguuuaggugggauuuucccauuuugcuguuuacugucacccugggauccucuucucugucccucugcuagcuccugagaagucucggaacacacgcuggugacugugggcuuuugaacaggaaccggcucaggcuugggugcagcagaugcucuuugcagagucauauucaaagagccuguacaacccuuaaucuuauucugggcuucaagaugagucauuccuugugcauuuauuccaucaaugcugagaaccacaucgccuauucuuacauuugccugggcugccuugccgccaucuuuuagcagcagagggaggccugauccacuuccugagcucugagacugcucaauuaagucucucagggauucuccaggaggaauguaaguuucauccuguucuaacccaaugcuguaucgaggucugguuucuugucuuuuauaccggaaguaacaaaauaauaugauaaggaccaagagcaaacuacagacagucacagauauaaguaaagcccugugguguauagguccaucaacaaaaucucuguuuuucaauggaggcaguguaggguguaggucuuuauuacauucguuccuuucugugcagcauucaauugaucuucuuugaugaggaaugggagugucccgacacugaaaaucugagccuucuaguccuaggcaaccagaagugaccacaggcaacccagagucauccucuucuaucaucgugaaacaauauccgucugugcugcaaauauuguugacugagucuucuggacaauggugguggcauuuacaacgcaagaccuuuggacggggggugggggcuguacucucaccauccucuuucuuggugcccacauuuaauuuuccugcacuucgcaaaagcauguuaucaaggaaguuugcuucucacuuauggcaggcuugcuuguuuaacuuuuuguuuccucucuugucauagcucagagccaaaugguuaugaaucagcagaagucugaaccuuuaucaacaaggcaugaaaugaucuuccuuuccuuucacaucuaagaaagaguaggcugaacuccaccccgcggcugcgcucccggcucccgcguccucagcgccgcggucuccgcacugcccggcgucccgcgaggccccgccgacuccgcgccccgcg

SEQ ID NO: 2465 - RNA, 6521 nt, Homo sapiens
ucauuuacaacaaugcagucauuuauuuauugaguaugugcacauuaugguauuauuacuauacugauuauauuuaucaugugacuucuaauuagaaaauguauccaaaagcaaaacagcagauauacaaaauuaaagagacagaagauagacauuaacagauaaggcaacuuauacauugagaauccaaauccaauacauuuaaacauuugggaaaugagggggacaaauggaagccagaucaaauuuguguaaaacuauucaguauguuucccuugcuucaugucugagaaggcucucccuucaauggggaugacaaacuccaaaugccacacaaauguuaacagaauacuagauucacacuggaacggggguaaagaagaaauuauuuucuauaaaagggcuccuaauguaguacugcuugaaaaugguacauuuuuguuguagauuauuuuaaacauaaugcuauaguaauauuuugaagauuugagcuguuauuuccauuuguuuuuacacugugacuaaaugauuagguuuuaguuuuagacucuaaacggaaccugaauuaauaggaaauaaacacgguacuauaguuguccuauggugccccuaugggugauggguuccaagaacccccuaggauacuaaaguccaugauguucaagucccuuauagaaaaugguguaguauuugcauauaaccuaugcacauccuaccauacacuuuaaaucaucucuagauuaccuauaauagcuaauacaauguaaaugcuuuguaaauaguuguuauacuauauuguuuaaugacaaaaaaaaguuuguacauguucagcaaaggcgcaaccauccauuuuuuuccccaaauauuuuugacccacagugggcugaaucacagaugcgaagccuauggacauggagggccaacuggacaagcauaagcaggggauacuuuuuagguugcuacuucagcaggcaacauucagaccauggaagucuagagaaagauuauaaaucugaacuuaccgcuaaaaauuuuaaaaugggaaauaaauccaaggaguuuuuagucaugcauuaugauuuuaaucuauguuaugccaaguacagcauuccaaaauauacaucuagagacuaaaaguaaaugcucuauagugaagaaguaauaauuaaaaaaugcuacuaauauagaaaauuuauaaucagaaaaauaaauauucagggagcucaccagaagaauaaagugcucugccaguuauuaaaggauuacugcuggugaauuaaauauggcauuccccaagggaaacagagagauucuucuggauuauguucaauauuuauuucacaggauuaacuguuuuaggaacagauauaaagcuucgccacggaagagauggacaaagcacaaagacaacaugauaccuuaggaagcaacacuacccuuucaggcauaaaauuuggagaaaugcaacauuaugcuucaugaauaauauguagaaagaaggucugaugaaaaugacauccuuaauguaagauaacuuuauaagaaaucugggucaaauaaaauucuuugaagaaaacauccaaaugucauugacuuaucaaauacuaucuuggcauauaaccuaugaaggcaaaacuaaacaaacaaacaaaaagcucacaccaaacaaaaccaucaacuuauuuuguauucuauaacauacaagacuguaaagaugugacaguguacauuauaugacaaugcacauuagccagcaagucuuuuauaggugguuucagcagcaacgauaaauaaugcagaauucagcuccagcacuuuauuucaaaagaaauuuccugccucccuccaagaugcagggugaggagguagcuugggguugcuauuggagaaguauucaguuugcuacuuugugucaccccuugccauucuuuuauccccaguuaauuauuaucugcauauaauauaaaucugcuagaccauaaauuaacagcuuucaggacagaugccuugaaaguucuuagggagguuaaacaaauauuguagccuaaaaccuccucuauaacaaacaugcacacaauggaagugaugucguaagugagugauggggcaggaaggaccuagggcucugucucgacuauaaaaucaccuugccccaaacaaauuuaaauuauaacuuaggagguucauggacuuucauccauucuggaaacaaagagaaaaaccaaaucaaauaccagaaucuguuuucucacugggcaaauagcaacaggauccacaguuuuaccacaauuguuucccugucuccaugugguaucuacauaauucuuuucccaaaggaggaaaucaaauaacaggccaaucugaguaauuaaacuccccucccaacacuacccaaccucugugaauaaaagcuuuccaaacuuugugaucacauuugaaauugguucacuuauuauugagagaaaaccacaaaaagucucaauuucaucacauccucaaaccaaucuuuuaauuuuuaaaugcagaagaagaaacaaaacgaaacaaaaagaucauucugcaaagagaccucucaacucuucaucagccaguggcauaacucagaaacugauuuaacuaauuuauuauuugagaaaaggggauugaaaaacaauugggggguauaaucuucugauucacaauucccagccacauucuuuucuauuuauucucucucucucuuuuuuuuuuuuuuuuuuuuuuuuuaagagccggagucuugcucugucaccaggcuggagugcaguggugugaucucagcucacugcaacuuccgucuccuggguucaagaauuuuccugccucagccucccaaguacaugggacuacaggcacgccccaccaugcccagcucauuuuuguauuuuuaguagagacaggguuucaccauguuggccaggaugaucuugaucucuugaccucaugauccgcccgucuuggccucccaaagugcugggaucacaggcgugagccaccacaccuggcccucuauuuauucucuuuaaagagagagaaaacuaugagaggccaaaauuauuuaauuaaaucuuuaccuuagcacaagggaaaaaaauggaauuugccuaauauaggugaugaagcauacacaaugaauagaaacaaucacauuuuaguaaaaggcaaaaauuugagacuuauaagcuauaugguagcuuauuuuuggguggggaagaaaugagaaaagaauauaacaucucuuacuggcaugacacauuuugauaaaaaaucuuauuguccuuuccuacuagaaugauccacuguaaggcaaaaauaauauacaagcaaaguuuuuuuuuggagacagagucucacucugucacccaggcuggagugcagugguacgaucuuggcucacugcaaccucucccucccggguucaagugauucucgugccucagccucuugaguagcugggauuacaggcgcgugccacugcguccggcuaauuuuuguauuuuuaguagagaugggguuucaccauguuggccaggcugaucucaaacuccugaccucaugugguccacccaccuuggccucccaaagugcugggauuacaggcgugagccaccgcgcucagccuacaagcaauuuuuuaaaaacugacaccuauuacugauaaaauucucuguuuaaaauccuauuuacuauuuuaaagauaaguauuaguuuuuuuuuaaauacaauaauucuguuauugauaaaauuuaaggcauuuucauugccuuuugcagauuuacucauaacuaccuaacaaggaaagaagguauaauuauuucagauuggauuauuuauucuaaaauuaaauucuucacuaauuuauucuaagaugaauuuaauaguccaucaggaaauugguuuuuauaaagcuuauuuuaugggcauaaaauacaggaaaaaguaauaauaaaugccaaaccgucucuuuacuuuaugaagccaaauauuuccucagacuugguuuuuaaagcuggaauuuauuccuucagggccacuauuauuuuucaaaacuccauauaaauauugaaucuaaaaauuaauuaguaauuuuaauuuuccuuuuucucuucaaauuccuucucuucuccugaacuguugacuuucaaaaauucacagaaugagcauguuucuuacacaggggcuuguccuucuuggagaaaaaggucugaccuuccaaacuuucacaacacacugagcauacaaagcaagugucaugccagguguagcccagagcuuccaggaacaugucaccagcuucuaugggaaauucacauccauggcauauaguaccaaagagggcauaauaaucagucucacaguaggguucaccauccuccaagugaaaaacauuguuccgaaugggcuuuccacaggcuacacacacaaaacaggaaacaugccaaguuuguuucaacgcacugaugacuucuccaaggaucuuccuuuggcaucgaccacauucaggggcaaagaauuucucauagcacagcucacaauacagggcuccuuucuccucuacaaauccaauguaggccauuguauuuuugcagugagcgcaguugaauucuucugggugccaagauuuccccagugccacuaagaaugguccucugaugaccugguuacaaugggcgcacaucggaguucguuucccugcuggaaugugcucagcucuuugcacuaaaguguccuggucacuuggcuggguuugucccaaagcugaguuggcuggugccacugauccugaguaaguagcgcuguuugagauucuuccaguggaagguacuccuugguuuggccguugccagcuuggugacuugaugacgccaguggauccuacaggcuugaaggcagcugcagcugugaggcugguaaccccuggucugccagagguugggcuguccaggcucucgggcaugcuccguguggaagcuaccgaggaagccaacugcggagaaggcuccugagaguuauuugccuucuuuguauuaucggcuucagauucuuucaaauguucagucccagugaucugggcaaggauucggaaagagcgagacugaguuguuccaguccuuggacgccagucuucaguauccucaaucagucucuucuugcuggcaucacugugaguggguacaugauaaaacucuguauagcgcuccacaauguguuuucuuggugggccauuuugcuguuuacugucacccugggauccucuucucugucccucugcuagcuccugagaagucucggaacacacgcuggugacugugggcuuuugaacaggaaccggcucaggcuugggugcagcagaugcucuaauaaauuuaacagccaggcccaggucagcaauacagcaaguuccauuuuucuucaccagaauguuuuuacuuuucagaucucgaugggcaauugcugguuugccuugaguacuaaagauuucuguguguaaaugacauaagccacugacagaagaguaggcuaacuucagcauugauuuagcgucuagggugguggacuucagauaaucauaaagggaaccauuuucaugauagucugugauuagguacaacuggguccaggacccugucccuuugauaucugcagcaaugaaacccaaaauguuuucaugccucaucaacacugucugauauauuucugucucucugaaccagcuggcuuccucuguggugaagaacacuuucacagcuaccuuuucgccacgccacuuucccauccaaacuuccccauagcgaccuuuuccaaucuguuucaccaucugaaucugcuuagcuauaguccuuuggaccagcagagggaggccugauccacuuccugagcucugagacugcucaauuaagucucucagggauucuccaggaggaauguaaguuucauccuguucuaacccaaugcuguaucgaggucugguuucuugucuuuuauaccggaaguaacaaaauaauaugauaaggaccaagagcaaacuacagacagucacagauauaaguaaagcccugugguguauagguccaucaacaaaaucucuguuuuucaauggaggcaguguaggguguaggucuuuauuacauucguuccuuucugugcagcauucaauugaucuucuuugaugaggaaugggagugucccgacacugaaaaucugagccuucuaguccuaggcaaccagaagugaccacaggcaacccagagucauccucuucuaucaucgugaaacaauauccgucugugcugcaaauauuguugacugagucuucuggacaauggugguggcauuuacaacgcaagaccuuuggacggggggugggggcuguacucucaccauccucuuucuuggugcccacauuuaauuuuccugcacuucgcaaaagcauguuaucaaggaaguuugcugaaagaagaaauagugagaguuaggcaucugugggguagacuaccccaguc

SEQ ID NO: 2466 - RNA, 2944 nt, Homo sapiens
ugucagagaauuguuuauuuuacccaguuauacuguaauaaguccuggauggcacugugucuagccucaaggaaacagaacaaguacaaagcuaaguuaaaggcaacuuuauuacaauacuuuuccaaacuucaaaaugcauuuauuacuaaauuuagcucuaauauauaauacacuauauuacaaggcagaaagcauuucuggucauauauuuagcuuccauguauugcccaaaacacagcuuccuaggaauagcagcagugcacaguaguuuacgucacuaaguaaaauauuucucugaugucucacaaucauucauauuguaauuuauuuuauguucuucugauuaaaaaaagcaaagcuaucuuuuccauaucuuauuaguuaauaccuagaaauugucuauauucuaaaaauauccacuagagauauuuccuuugauaggaaauaggauuugcaaauccaaccaaaccaaagaauacuguauuucuccauugcaaauagggguaaaauucucuucuuuccuuuuucaggagccaaaucuggaccuccuccucuucauagagccauccugaauaguaccuacuuuaaaagauaccuaaaucuacaaugcacgcacucuucuuuaauaaagucuuuguuuauucuugccuccuuauauuuacuuauuuagaauaauuuacaaucaacuuugaauguaacauaauaaugaacuuaaaaaguaaucuugggagauguuaauaauauaaagaaaguauuuuccaaauuagacaaggacuuuauuugcucauuauccucugcuucaaccaaccaacuaaccaaauucaacuuaugaaaauaauucguuuuccaagauuacuacccuaaucacaacaaaaacagauacaaauccacaaauagaucuagucccuuaauuuucuauuuuuuuuuuuuuuugguuuuacauuugugagcuaccaacuagcacaaaacauguucaucuuccuuuucucacaacaauaggaaauuguuagaaaaguauagaaaaaguucuauuuuuucauaaggcaaauuuaauacagauuuugcuaugaaguugaaaaaaaaaaaguaaaugaaaagguaugugcuggcugcuuggggggcaaggcucauaaaucacuguacguuaagagcacgugcugaaacuucauggugccagucacguaauuuuguguauuugggacuaaagacgugaagggguaucuuuuccuuugccuucuuuguauuaucggcuucagauucuuucaaauguucagucccagugaucugggcaaggauucggaaagagcgagacugaguuguuccaguccuuggacgccagucuucaguauccucaaucagucucuucuugcuggcaucacugugaguggguacaugauaaaacucuguauagcgcuccacaauguguuuucuuggugggcguuuaggugggauuuucccauuuugcuguuuacugucacccugggauccucuucucugucccucugcuagcuccugagaagucucggaacacacgcuggugacugugggcuuuugaacaggaaccggcucaggcuugggugcagcagaugcucuaauaaauuuaacagccaggcccaggucagcaauacagcaaguuccauuuuucuucaccagaauguuuuuacuuuucagaucucgaugggcaauugcugguuugccuugaguacuaaagauuucuguguguaaaugacauaagccacugacagaagaguaggcuaacuucagcauugauuuagcgucuagggugguggacuucagauaaucauaaagggaaccauuuucaugauagucugugauuagguacaacuggguccaggacccugucccuuugauaucugcagcaaugaaacccaaaauguuuucaugccucaucaacacugucugauauauuucugucucucugaaccagcuggcuuccucuguggugaagaacacuuucacagcuaccuuuucgccacgccacuuucccauccaaacuuccccauagcgaccuuuuccaaucuguuucaccaucugaaucugcuuagcuauaguccuuuggaccagcagagggaggccugauccacuuccugagcucugagacugcucaauuaagucucucagggauucuccaggaggaauguaaguuucauccuguucuaacccaaugcuguaucgaggucugguuucuugucuuuuauaccggaaguaacaaaauaauaugauaaggaccaagagcaaacuacagacagucacagauauaaguaaagcccugugguguauagguccaucaacaaaaucucuguuuuucaauggaggcaguguaggguguaggucuuuauuacauucguuccuuucugugcagcauucaauugaucuucuuugaugaggaaugggagugucccgacacugaaaaucugagccuucuaguccuaggcaaccagaagugaccacaggcaacccagagucauccucuucuaucaucgugaaacaauauccgucugugcugcaaauauuguugacugagucuucuggacaauggugguggcauuuacaacgcaagaccuuuggacggggggugggggcuguacucucaccauccucuuucuuggugcccacauuuaauuuuccugcacuucgcaaaagcauguuaucaaggaaguuugcuucucacuuauggcaggcuugcuuguuuaacuuuuuguuuccucucuugucauagcucagagccaaaugguuaugaaucagcagaagucugaaccuuuaucaacaaggcaugaaaugaucuuccuuuccuuucacaucuaagaaagaguaggcugaacuccaccccgcggcugcgcucccggcucccgcguccucagcgccgcggucuccgcacugcccggcgucccgcgaggccccgccgacuccgcgccccgcg

SEQ ID NO: 2467 - RNA, 5402 nt, Homo sapiens
ucauuuacaacaaugcagucauuuauuuauugaguaugugcacauuaugguauuauuacuauacugauuauauuuaucaugugacuucuaauuagaaaauguauccaaaagcaaaacagcagauauacaaaauuaaagagacagaagauagacauuaacagauaaggcaacuuauacauugagaauccaaauccaauacauuuaaacauuugggaaaugagggggacaaauggaagccagaucaaauuuguguaaaacuauucaguauguuucccuugcuucaugucugagaaggcucucccuucaauggggaugacaaacuccaaaugccacacaaauguuaacagaauacuagauucacacuggaacggggguaaagaagaaauuauuuucuauaaaagggcuccuaauguaguacugcuugaaaaugguacauuuuuguuguagauuauuuuaaacauaaugcuauaguaauauuuugaagauuugagcuguuauuuccauuuguuuuuacacugugacuaaaugauuagguuuuaguuuuagacucuaaacggaaccugaauuaauaggaaauaaacacgguacuauaguuguccuauggugccccuaugggugauggguuccaagaacccccuaggauacuaaaguccaugauguucaagucccuuauagaaaaugguguaguauuugcauauaaccuaugcacauccuaccauacacuuuaaaucaucucuagauuaccuauaauagcuaauacaauguaaaugcuuuguaaauaguuguuauacuauauuguuuaaugacaaaaaaaaguuuguacauguucagcaaaggcgcaaccauccauuuuuuuccccaaauauuuuugacccacagugggcugaaucacagaugcgaagccuauggacauggagggccaacuggacaagcauaagcaggggauacuuuuuagguugcuacuucagcaggcaacauucagaccauggaagucuagagaaagauuauaaaucugaacuuaccgcuaaaaauuuuaaaaugggaaauaaauccaaggaguuuuuagucaugcauuaugauuuuaaucuauguuaugccaaguacagcauuccaaaauauacaucuagagacuaaaaguaaaugcucuauagugaagaaguaauaauuaaaaaaugcuacuaauauagaaaauuuauaaucagaaaaauaaauauucagggagcucaccagaagaauaaagugcucugccaguuauuaaaggauuacugcuggugaauuaaauauggcauuccccaagggaaacagagagauucuucuggauuauguucaauauuuauuucacaggauuaacuguuuuaggaacagauauaaagcuucgccacggaagagauggacaaagcacaaagacaacaugauaccuuaggaagcaacacuacccuuucaggcauaaaauuuggagaaaugcaacauuaugcuucaugaauaauauguagaaagaaggucugaugaaaaugacauccuuaauguaagauaacuuuauaagaaaucugggucaaauaaaauucuuugaagaaaacauccaaaugucauugacuuaucaaauacuaucuuggcauauaaccuaugaaggcaaaacuaaacaaacaaacaaaaagcucacaccaaacaaaaccaucaacuuauuuuguauucuauaacauacaagacuguaaagaugugacaguguacauuauaugacaaugcacauuagccagcaagucuuuuauaggugguuucagcagcaacgauaaauaaugcagaauucagcuccagcacuuuauuucaaaagaaauuuccugccucccuccaagaugcagggugaggagguagcuugggguugcuauuggagaaguauucaguuugcuacuuugugucaccccuugccauucuuuuauccccaguuaauuauuaucugcauauaauauaaaucugcuagaccauaaauuaacagcuuucaggacagaugccuugaaaguucuuagggagguuaaacaaauauuguagccuaaaaccuccucuauaacaaacaugcacacaauggaagugaugucguaagugagugauggggcaggaaggaccuagggcucugucucgacuauaaaaucaccuugccccaaacaaauuuaaauuauaacuuaggagguucauggacuuucauccauucuggaaacaaagagaaaaaccaaaucaaauaccagaaucuguuuucucacugggcaaauagcaacaggauccacaguuuuaccacaauuguuucccugucuccaugugguaucuacauaauucuuuucccaaaggaggaaaucaaauaacaggccaaucugaguaauuaaacuccccucccaacacuacccaaccucugugaauaaaagcuuuccaaacuuugugaucacauuugaaauugguucacuuauuauugagagaaaaccacaaaaagucucaauuucaucacauccucaaaccaaucuuuuaauuuuuaaaugcagaagaagaaacaaaacgaaacaaaaagaucauucugcaaagagaccucucaacucuucaucagccaguggcauaacucagaaacugauuuaacuaauuuauuauuugagaaaaggggauugaaaaacaauugggggguauaaucuucugauucacaauucccagccacauucuuuucuauuuauucucucucucucuuuuuuuuuuuuuuuuuuuuuuuuuaagagccggagucuugcucugucaccaggcuggagugcaguggugugaucucagcucacugcaacuuccgucuccuggguucaagaauuuuccugccucagccucccaaguacaugggacuacaggcacgccccaccaugcccagcucauuuuuguauuuuuaguagagacaggguuucaccauguuggccaggaugaucuugaucucuugaccucaugauccgcccgucuuggccucccaaagugcugggaucacaggcgugagccaccacaccuggcccucuauuuauucucuuuaaagagagagaaaacuaugagaggccaaaauuauuuaauuaaaucuuuaccuuagcacaagggaaaaaaauggaauuugccuaauauaggugaugaagcauacacaaugaauagaaacaaucacauuuuaguaaaaggcaaaaauuugagacuuauaagcuauaugguagcuuauuuuuggguggggaagaaaugagaaaagaauauaacaucucuuacuggcaugacacauuuugauaaaaaaucuuauuguccuuuccuacuagaaugauccacuguaaggcaaaaauaauauacaagcaaaguuuuuuuuuggagacagagucucacucugucacccaggcuggagugcagugguacgaucuuggcucacugcaaccucucccucccggguucaagugauucucgugccucagccucuugaguagcugggauuacaggcgcgugccacugcguccggcuaauuuuuguauuuuuaguagagaugggguuucaccauguuggccaggcugaucucaaacuccugaccucaugugguccacccaccuuggccucccaaagugcugggauuacaggcgugagccaccgcgcucagccuacaagcaauuuuuuaaaaacugacaccuauuacugauaaaauucucuguuuaaaauccuauuuacuauuuuaaagauaaguauuaguuuuuuuuuaaauacaauaauucuguuauugauaaaauuuaaggcauuuucauugccuuuugcagauuuacucauaacuaccuaacaaggaaagaagguauaauuauuucagauuggauuauuuauucuaaaauuaaauucuucacuaauuuauucuaagaugaauuuaauaguccaucaggaaauugguuuuuauaaagcuuauuuuaugggcauaaaauacaggaaaaaguaauaauaaaugccaaaccgucucuuuacuuuaugaagccaaauauuuccucagacuugguuuuuaaagcuggaauuuauuccuucagggccacuauuauuuuucaaaacuccauauaaauauugaaucuaaaaauuaauuaguaauuuuaauuuuccuuuuucucuucaaauuccuucucuucuccugaacuguugacuuucaaaaauucacagaaugagcauguuucuuacacaggggcuuguccuucuuggagaaaaaggucugaccuuccaaacuuucacaacacacugagcauacaaagcaagugucaugccagguguagcccagagcuuccaggaacaugucaccagcuucuaugggaaauucacauccauggcauauaguaccaaagagggcauaauaaucagucucacaguaggguucaccauccuccaagugaaaaacauuguuccgaaugggcuuuccacaggcuacacacacaaaacaggaaacaugccaaguuuguuucaacgcacugaugacuucuccaaggaucuuccuuuggcaucgaccacauucaggggcaaagaauuucucauagcacagcucacaauacagggcuccuuucuccucuacaaauccaauguaggccauuguauuuuugcagugagcgcaguugaauucuucugggugccaagauuuccccagugccacuaagaaugguccucugaugaccugguuacaaugggcgcacaucggaguucguuucccugcuggaaugugcucagcucuuugcacuaaaguguccuggucacuuggcuggguuugucccaaagcugaguuggcuggugccacugauccugaguaaguagcgcuguuugagauucuuccaguggaagguacuccuugguuuggccguugccagcuuggugacuugaugacgccaguggauccuacaggcuugaaggcagcugcagcugugaggcugguaaccccuggucugccagagguugggcuguccaggcucucgggcaugcuccguguggaagcuaccgaggaagccaacugcggagaaggcuccugagaguuauuugccuucuuuguauuaucggcuucagauucuuucaaauguucagucccagugaucugggcaaggauucggaaagagcgagacugaguuguuccaguccuuggacgccagucuucaguauccucaaucagucucuucuugcuggcaucacugugaguggguacaugauaaaacucuguauagcgcuccacaauguguuuucuuggugggcuuuaucaacaaggcaugaaaugaucuuccuuuccuuucacaucuaagaaagaguaggcugaacuccaccccgcggcugcgcucccggcucccgcguccucagcgccgcggucuccgcacugcccggcgucccgcgaggccccgccgacuccgcgccccgcg

SEQ ID NO: 2468 - skipped

SEQ ID NO: 2469 - RNA, 2764 nt, Homo sapiens
ugucagagaauuguuuauuuuacccaguuauacuguaauaaguccuggauggcacugugucuagccucaaggaaacagaacaaguacaaagcuaaguuaaaggcaacuuuauuacaauacuuuuccaaacuucaaaaugcauuuauuacuaaauuuagcucuaauauauaauacacuauauuacaaggcagaaagcauuucuggucauauauuuagcuuccauguauugcccaaaacacagcuuccuaggaauagcagcagugcacaguaguuuacgucacuaaguaaaauauuucucugaugucucacaaucauucauauuguaauuuauuuuauguucuucugauuaaaaaaagcaaagcuaucuuuuccauaucuuauuaguuaauaccuagaaauugucuauauucuaaaaauauccacuagagauauuuccuuugauaggaaauaggauuugcaaauccaaccaaaccaaagaauacuguauuucuccauugcaaauagggguaaaauucucuucuuuccuuuuucaggagccaaaucuggaccuccuccucuucauagagccauccugaauaguaccuacuuuaaaagauaccuaaaucuacaaugcacgcacucuucuuuaauaaagucuuuguuuauucuugccuccuuauauuuacuuauuuagaauaauuuacaaucaacuuugaauguaacauaauaaugaacuuaaaaaguaaucuugggagauguuaauaauauaaagaaaguauuuuccaaauuagacaaggacuuuauuugcucauuauccucugcuucaaccaaccaacuaaccaaauucaacuuaugaaaauaauucguuuuccaagauuacuacccuaaucacaacaaaaacagauacaaauccacaaauagaucuagucccuuaauuuucuauuuuuuuuuuuuuuugguuuuacauuugugagcuaccaacuagcacaaaacauguucaucuuccuuuucucacaacaauaggaaauuguuagaaaaguauagaaaaaguucuauuuuuucauaaggcaaauuuaauacagauuuugcuaugaaguugaaaaaaaaaaaguaaaugaaaagguaugugcuggcugcuuggggggcaaggcucauaaaucacuguacguuaagagcacgugcugaaacuucauggugccagucacguaauuuuguguauuugggacuaaagacgugaagggguaucuuuuccuuugccuucuuuguauuaucggcuucagauucuuucaaauguucagucccagugaucugggcaaggauucggaaagagcgagacugaguuguuccaguccuuggacgccagucuucaguauccucaaucagucucuucuugcuggcaucacugugaguggguacaugauaaaacucuguauagcgcuccacaauguguuuucuuggugggcguuuaggugggauuuucacagugccaggguuauuugucacuuguguuuucuuuugaacaggaaccggcucaggcuugggugcagcagaugcucuaauaaauuuaacagccaggcccaggucagcaauacagcaaguuccauuuuucuucaccagaauguuuuuacuuuucagaucucgaugggcaauugcugguuugccuugaguacuaaagauuucuguguguaaaugacauaagccacugacagaagaguaggcuaacuucagcauugauuuagcgucuagggugguggacuucagauaaucauaaagggaaccauuuucaugauagucugugauuagguacaacuggguccaggacccugucccuuugauaucugcagcaaugaaacccaaaauguuuucaugccucaucaacacugucugauauauuucugucucucugaaccagcuggcuuccucuguggugaagaacacuuucacagcuaccuuuucgccacgccacuuucccauccaaacuuccccauagcgaccuuuuccaaucuguuucaccaucugaaucugcuuagcuauaguccuuuggaccagcagagggaggccugauccacuuccugagcucugagacugcucaauuaagucucucagggauucuccaggaggaauguaaguuucauccuguucuaacccaaugcuguaucgaggucugguuucuugucuuuuauaccggaaguaacaaaauaauaugauaaggaccaagagcaaacuacagacagucacagauauaaguaaagcccugugguguauagguccaucaacaaaaucucuguuuuucaauggaggcaguguaggguguaggucuuuauuacauucguuccuuucugugcagcauucaauugaucuucuuugaugaggaaugggagugucccgacacugaaaaucugagccuucuaguccuaggcaaccagaagugaccacaggcaacccagagucauccucuucuaucaucgugaaacaauauccgucugugcugcaaauauuguugacugagucuucuggacaauggugguggcauuuacaacgcaagaccuuuggacggggggugggggcuguacucucaccauccucuuucuuggugcccacauuuaauuuuccugcacuucgcaaaagcauguuaucaaggaaguuuguuuugauuucuguacgcuugauauaugguugccaggcucccuaggaugagagacaugaggaggaggcacagaauugcuagggguuuccacuaaaaagcccagcaccguaggcagcacuaauccugcaccugugauau

SEQ ID NO: 2470 - RNA, 6336 nt, Homo sapiens
ucauuuacaacaaugcagucauuuauuuauugaguaugugcacauuaugguauuauuacuauacugauuauauuuaucaugugacuucuaauuagaaaauguauccaaaagcaaaacagcagauauacaaaauuaaagagacagaagauagacauuaacagauaaggcaacuuauacauugagaauccaaauccaauacauuuaaacauuugggaaaugagggggacaaauggaagccagaucaaauuuguguaaaacuauucaguauguuucccuugcuucaugucugagaaggcucucccuucaauggggaugacaaacuccaaaugccacacaaauguuaacagaauacuagauucacacuggaacggggguaaagaagaaauuauuuucuauaaaagggcuccuaauguaguacugcuugaaaaugguacauuuuuguuguagauuauuuuaaacauaaugcuauaguaauauuuugaagauuugagcuguuauuuccauuuguuuuuacacugugacuaaaugauuagguuuuaguuuuagacucuaaacggaaccugaauuaauaggaaauaaacacgguacuauaguuguccuauggugccccuaugggugauggguuccaagaacccccuaggauacuaaaguccaugauguucaagucccuuauagaaaaugguguaguauuugcauauaaccuaugcacauccuaccauacacuuuaaaucaucucuagauuaccuauaauagcuaauacaauguaaaugcuuuguaaauaguuguuauacuauauuguuuaaugacaaaaaaaaguuuguacauguucagcaaaggcgcaaccauccauuuuuuuccccaaauauuuuugacccacagugggcugaaucacagaugcgaagccuauggacauggagggccaacuggacaagcauaagcaggggauacuuuuuagguugcuacuucagcaggcaacauucagaccauggaagucuagagaaagauuauaaaucugaacuuaccgcuaaaaauuuuaaaaugggaaauaaauccaaggaguuuuuagucaugcauuaugauuuuaaucuauguuaugccaaguacagcauuccaaaauauacaucuagagacuaaaaguaaaugcucuauagugaagaaguaauaauuaaaaaaugcuacuaauauagaaaauuuauaaucagaaaaauaaauauucagggagcucaccagaagaauaaagugcucugccaguuauuaaaggauuacugcuggugaauuaaauauggcauuccccaagggaaacagagagauucuucuggauuauguucaauauuuauuucacaggauuaacuguuuuaggaacagauauaaagcuucgccacggaagagauggacaaagcacaaagacaacaugauaccuuaggaagcaacacuacccuuucaggcauaaaauuuggagaaaugcaacauuaugcuucaugaauaauauguagaaagaaggucugaugaaaaugacauccuuaauguaagauaacuuuauaagaaaucugggucaaauaaaauucuuugaagaaaacauccaaaugucauugacuuaucaaauacuaucuuggcauauaaccuaugaaggcaaaacuaaacaaacaaacaaaaagcucacaccaaacaaaaccaucaacuuauuuuguauucuauaacauacaagacuguaaagaugugacaguguacauuauaugacaaugcacauuagccagcaagucuuuuauaggugguuucagcagcaacgauaaauaaugcagaauucagcuccagcacuuuauuucaaaagaaauuuccugccucccuccaagaugcagggugaggagguagcuugggguugcuauuggagaaguauucaguuugcuacuuugugucaccccuugccauucuuuuauccccaguuaauuauuaucugcauauaauauaaaucugcuagaccauaaauuaacagcuuucaggacagaugccuugaaaguucuuagggagguuaaacaaauauuguagccuaaaaccuccucuauaacaaacaugcacacaauggaagugaugucguaagugagugauggggcaggaaggaccuagggcucugucucgacuauaaaaucaccuugccccaaacaaauuuaaauuauaacuuaggagguucauggacuuucauccauucuggaaacaaagagaaaaaccaaaucaaauaccagaaucuguuuucucacugggcaaauagcaacaggauccacaguuuuaccacaauuguuucccugucuccaugugguaucuacauaauucuuuucccaaaggaggaaaucaaauaacaggccaaucugaguaauuaaacuccccucccaacacuacccaaccucugugaauaaaagcuuuccaaacuuugugaucacauuugaaauugguucacuuauuauugagagaaaaccacaaaaagucucaauuucaucacauccucaaaccaaucuuuuaauuuuuaaaugcagaagaagaaacaaaacgaaacaaaaagaucauucugcaaagagaccucucaacucuucaucagccaguggcauaacucagaaacugauuuaacuaauuuauuauuugagaaaaggggauugaaaaacaauugggggguauaaucuucugauucacaauucccagccacauucuuuucuauuuauucucucucucucuuuuuuuuuuuuuuuuuuuuuuuuuaagagccggagucuugcucugucaccaggcuggagugcaguggugugaucucagcucacugcaacuuccgucuccuggguucaagaauuuuccugccucagccucccaaguacaugggacuacaggcacgccccaccaugcccagcucauuuuuguauuuuuaguagagacaggguuucaccauguuggccaggaugaucuugaucucuugaccucaugauccgcccgucuuggccucccaaagugcugggaucacaggcgugagccaccacaccuggcccucuauuuauucucuuuaaagagagagaaaacuaugagaggccaaaauuauuuaauuaaaucuuuaccuuagcacaagggaaaaaaauggaauuugccuaauauaggugaugaagcauacacaaugaauagaaacaaucacauuuuaguaaaaggcaaaaauuugagacuuauaagcuauaugguagcuuauuuuuggguggggaagaaaugagaaaagaauauaacaucucuuacuggcaugacacauuuugauaaaaaaucuuauuguccuuuccuacuagaaugauccacuguaaggcaaaaauaauauacaagcaaaguuuuuuuuuggagacagagucucacucugucacccaggcuggagugcagugguacgaucuuggcucacugcaaccucucccucccggguucaagugauucucgugccucagccucuugaguagcugggauuacaggcgcgugccacugcguccggcuaauuuuuguauuuuuaguagagaugggguuucaccauguuggccaggcugaucucaaacuccugaccucaugugguccacccaccuuggccucccaaagugcugggauuacaggcgugagccaccgcgcucagccuacaagcaauuuuuuaaaaacugacaccuauuacugauaaaauucucuguuuaaaauccuauuuacuauuuuaaagauaaguauuaguuuuuuuuuaaauacaauaauucuguuauugauaaaauuuaaggcauuuucauugccuuuugcagauuuacucauaacuaccuaacaaggaaagaagguauaauuauuucagauuggauuauuuauucuaaaauuaaauucuucacuaauuuauucuaagaugaauuuaauaguccaucaggaaauugguuuuuauaaagcuuauuuuaugggcauaaaauacaggaaaaaguaauaauaaaugccaaaccgucucuuuacuuuaugaagccaaauauuuccucagacuugguuuuuaaagcuggaauuuauuccuucagggccacuauuauuuuucaaaacuccauauaaauauugaaucuaaaaauuaauuaguaauuuuaauuuuccuuuuucucuucaaauuccuucucuucuccugaacuguugacuuucaaaaauucacagaaugagcauguuucuuacacaggggcuuguccuucuuggagaaaaaggucugaccuuccaaacuuucacaacacacugagcauacaaagcaagugucaugccagguguagcccagagcuuccaggaacaugucaccagcuucuaugggaaauucacauccauggcauauaguaccaaagagggcauaauaaucagucucacaguaggguucaccauccuccaagugaaaaacauuguuccgaaugggcuuuccacaggcuacacacacaaaacaggaaacaugccaaguuuguuucaacgcacugaugacuucuccaaggaucuuccuuuggcaucgaccacauucaggggcaaagaauuucucauagcacagcucacaauacagggcuccuuucuccucuacaaauccaauguaggccauuguauuuuugcagugagcgcaguugaauucuucugggugccaagauuuccccagugccacuaagaaugguccucugaugaccugguuacaaugggcgcacaucggaguucguuucccugcuggaaugugcucagcucuuugcacuaaaguguccuggucacuuggcuggguuugucccaaagcugaguuggcuggugccacugauccugaguaaguagcgcuguuugagauucuuccaguggaagguacuccuugguuuggccguugccagcuuggugacuugaugacgccaguggauccuacaggcuugaaggcagcugcagcugugaggcugguaaccccuggucugccagagguugggcuguccaggcucucgggcaugcuccguguggaagcuaccgaggaagccaacugcggagaaggcuccugagaguuacuuguuuucuuaacauggauagagccaguugauuuccuugaggacugcagauaggaaaaagcuaaaggcuuggagacagggcugaugcaaagugcauccaggagugagugauaucuuucaggaguguagagccugguuuuuguagcaauaacagcagacacaguagcagcugcgcugcucagaacugcagcacuauaucuagcaggagaagagaagguagaaaaguuucgaaaaccuucgaaagaaucuuccacauuuccuguggagcugcuuaaacuagaauaaguaguugcuacuuuagaaaguguggccacuuggcuaccaauaguuaacaccugaggaguugcaggagggugagguccacucuuagguaggucuuccagagcacugucaaacuuugccuucuuuguauuaucggcuucagauucuuucaaauguucagucccagugaucugggcaaggauucggaaagagcgagacugaguuguuccaguccuuggacgccagucuucaguauccucaaucagucucuucuugcuggcaucacugugaguggguacaugauaaaacucuguauagcgcuccacaauguguuuucuuggugggcguuuaggugggauuuucccauuuugcuguuuacugucacccugggauccucuucucugucccucugcuagcuccugagaagucucggaacacacgcuggugacugugggcuuuugaacaggaaccggcucaggcuugggugcagcagaugcucuuugcagagucauauucaaagagccuguacaacccuuaaucuuauucugggcuucaagaugagucauuccuugugcauuuauuccaucaaugcugagaaccacaucgccuauucuuacauuugccugggcugccuugccgccaucuuuuagacuagagauugucagaggcauguugaaauccuuaccgcccugcagccggaaaccccaaggagcugggccaaccagugacacacuguaguugcucaugguucuaauggcucaaaguccaaugacagaaaaugaaauaugcuucucacuuauggcaggcuugcuuguuuaacuuuuuguuuccucucuugucauagcucagagccaaaugguuaugaaucagcagaagucugaaccuuuaucaacaaggcaugaaaugaucuuccuuuccuuucacaucuaagaaagaguaggcugaacuccaccccgcggcugcgcucccggcucccgcguccucagcgccgcggucuccgcacugcccggcgucccgcgaggccccgccgacuccgcgccccgcg

SEQ ID NO: 2471 - RNA, 5243 nt, Homo sapiens
ucauuuacaacaaugcagucauuuauuuauugaguaugugcacauuaugguauuauuacuauacugauuauauuuaucaugugacuucuaauuagaaaauguauccaaaagcaaaacagcagauauacaaaauuaaagagacagaagauagacauuaacagauaaggcaacuuauacauugagaauccaaauccaauacauuuaaacauuugggaaaugagggggacaaauggaagccagaucaaauuuguguaaaacuauucaguauguuucccuugcuucaugucugagaaggcucucccuucaauggggaugacaaacuccaaaugccacacaaauguuaacagaauacuagauucacacuggaacggggguaaagaagaaauuauuuucuauaaaagggcuccuaauguaguacugcuugaaaaugguacauuuuuguuguagauuauuuuaaacauaaugcuauaguaauauuuugaagauuugagcuguuauuuccauuuguuuuuacacugugacuaaaugauuagguuuuaguuuuagacucuaaacggaaccugaauuaauaggaaauaaacacgguacuauaguuguccuauggugccccuaugggugauggguuccaagaacccccuaggauacuaaaguccaugauguucaagucccuuauagaaaaugguguaguauuugcauauaaccuaugcacauccuaccauacacuuuaaaucaucucuagauuaccuauaauagcuaauacaauguaaaugcuuuguaaauaguuguuauacuauauuguuuaaugacaaaaaaaaguuuguacauguucagcaaaggcgcaaccauccauuuuuuuccccaaauauuuuugacccacagugggcugaaucacagaugcgaagccuauggacauggagggccaacuggacaagcauaagcaggggauacuuuuuagguugcuacuucagcaggcaacauucagaccauggaagucuagagaaagauuauaaaucugaacuuaccgcuaaaaauuuuaaaaugggaaauaaauccaaggaguuuuuagucaugcauuaugauuuuaaucuauguuaugccaaguacagcauuccaaaauauacaucuagagacuaaaaguaaaugcucuauagugaagaaguaauaauuaaaaaaugcuacuaauauagaaaauuuauaaucagaaaaauaaauauucagggagcucaccagaagaauaaagugcucugccaguuauuaaaggauuacugcuggugaauuaaauauggcauuccccaagggaaacagagagauucuucuggauuauguucaauauuuauuucacaggauuaacuguuuuaggaacagauauaaagcuucgccacggaagagauggacaaagcacaaagacaacaugauaccuuaggaagcaacacuacccuuucaggcauaaaauuuggagaaaugcaacauuaugcuucaugaauaauauguagaaagaaggucugaugaaaaugacauccuuaauguaagauaacuuuauaagaaaucugggucaaauaaaauucuuugaagaaaacauccaaaugucauugacuuaucaaauacuaucuuggcauauaaccuaugaaggcaaaacuaaacaaacaaacaaaaagcucacaccaaacaaaaccaucaacuuauuuuguauucuauaacauacaagacuguaaagaugugacaguguacauuauaugacaaugcacauuagccagcaagucuuuuauaggugguuucagcagcaacgauaaauaaugcagaauucagcuccagcacuuuauuucaaaagaaauuuccugccucccuccaagaugcagggugaggagguagcuugggguugcuauuggagaaguauucaguuugcuacuuugugucaccccuugccauucuuuuauccccaguuaauuauuaucugcauauaauauaaaucugcuagaccauaaauuaacagcuuucaggacagaugccuugaaaguucuuagggagguuaaacaaauauuguagccuaaaaccuccucuauaacaaacaugcacacaauggaagugaugucguaagugagugauggggcaggaaggaccuagggcucugucucgacuauaaaaucaccuugccccaaacaaauuuaaauuauaacuuaggagguucauggacuuucauccauucuggaaacaaagagaaaaaccaaaucaaauaccagaaucuguuuucucacugggcaaauagcaacaggauccacaguuuuaccacaauuguuucccugucuccaugugguaucuacauaauucuuuucccaaaggaggaaaucaaauaacaggccaaucugaguaauuaaacuccccucccaacacuacccaaccucugugaauaaaagcuuuccaaacuuugugaucacauuugaaauugguucacuuauuauugagagaaaaccacaaaaagucucaauuucaucacauccucaaaccaaucuuuuaauuuuuaaaugcagaagaagaaacaaaacgaaacaaaaagaucauucugcaaagagaccucucaacucuucaucagccaguggcauaacucagaaacugauuuaacuaauuuauuauuugagaaaaggggauugaaaaacaauugggggguauaaucuucugauucacaauucccagccacauucuuuucuauuuauucucucucucucuuuuuuuuuuuuuuuuuuuuuuuuuaagagccggagucuugcucugucaccaggcuggagugcaguggugugaucucagcucacugcaacuuccgucuccuggguucaagaauuuuccugccucagccucccaaguacaugggacuacaggcacgccccaccaugcccagcucauuuuuguauuuuuaguagagacaggguuucaccauguuggccaggaugaucuugaucucuugaccucaugauccgcccgucuuggccucccaaagugcugggaucacaggcgugagccaccacaccuggcccucuauuuauucucuuuaaagagagagaaaacuaugagaggccaaaauuauuuaauuaaaucuuuaccuuagcacaagggaaaaaaauggaauuugccuaauauaggugaugaagcauacacaaugaauagaaacaaucacauuuuaguaaaaggcaaaaauuugagacuuauaagcuauaugguagcuuauuuuuggguggggaagaaaugagaaaagaauauaacaucucuuacuggcaugacacauuuugauaaaaaaucuuauuguccuuuccuacuagaaugauccacuguaaggcaaaaauaauauacaagcaaaguuuuuuuuuggagacagagucucacucugucacccaggcuggagugcagugguacgaucuuggcucacugcaaccucucccucccggguucaagugauucucgugccucagccucuugaguagcugggauuacaggcgcgugccacugcguccggcuaauuuuuguauuuuuaguagagaugggguuucaccauguuggccaggcugaucucaaacuccugaccucaugugguccacccaccuuggccucccaaagugcugggauuacaggcgugagccaccgcgcucagccuacaagcaauuuuuuaaaaacugacaccuauuacugauaaaauucucuguuuaaaauccuauuuacuauuuuaaagauaaguauuaguuuuuuuuuaaauacaauaauucuguuauugauaaaauuuaaggcauuuucauugccuuuugcagauuuacucauaacuaccuaacaaggaaagaagguauaauuauuucagauuggauuauuuauucuaaaauuaaauucuucacuaauuuauucuaagaugaauuuaauaguccaucaggaaauugguuuuuauaaagcuuauuuuaugggcauaaaauacaggaaaaaguaauaauaaaugccaaaccgucucuuuacuuuaugaagccaaauauuuccucagacuugguuuuuaaagcuggaauuuauuccuucagggccacuauuauuuuucaaaacuccauauaaauauugaaucuaaaaauuaauuaguaauuuuaauuuuccuuuuucucuucaaauuccuucucuucuccugaacuguugacuuucaaaaauucacagaaugagcauguuucuuacacaggggcuuguccuucuuggagaaaaaggucugaccuuccaaacuuucacaacacacugagcauacaaagcaagugucaugccagguguagcccagagcuuccaggaacaugucaccagcuucuaugggaaauucacauccauggcauauaguaccaaagagggcauaauaaucagucucacaguaggguucaccauccuccaagugaaaaacauuguuccgaaugggcuuuccacaggcuacacacacaaaacaggaaacaugccaaguuuguuucaacgcacugaugacuucuccaaggaucuuccuuuggcaucgaccacauucaggggcaaagaauuucucauagcacagcucacaauacagggcuccuuucuccucuacaaauccaauguaggccauuguauuuuugcagugagcgcaguugaauucuucugggugccaagauuuccccagugccacuaagaaugguccucugaugaccugguuacaaugggcgcacaucggaguucguuucccugcuggaaugugcucagcucuuugcacuaaaguguccuggucacuuggcuggguuugucccaaagcugaguuggcuggugccacugauccugaguaaguagcgcuguuugagauucuuccaguggaagguacuccuugguuuggccguugccagcuuggugacuugaugacgccaguggauccuacaggcuugaaggcagcugcagcugugaggcugguaaccccuggucugccagagguugggcuguccaggcucucgggcaugcuccguguggaagcuaccgaggaagccaacugcggagaaggcuccugagaguuacugcaaauauuguugacugagucuucuggacaauggugguggcauuuacaacgcaagaccuuuggacggggggugggggcuguacucucaccauccucuuucuuggugcccacauuuaauuuuccugcacuucgcaaaagcauguuaucaaggaaguuugcugaaagaagaaauagugagaguuaggcaucugugggguagacuaccccaguc

SEQ ID NO: 2472 - RNA, 6249 nt, Homo sapiens
ucauuuacaacaaugcagucauuuauuuauugaguaugugcacauuaugguauuauuacuauacugauuauauuuaucaugugacuucuaauuagaaaauguauccaaaagcaaaacagcagauauacaaaauuaaagagacagaagauagacauuaacagauaaggcaacuuauacauugagaauccaaauccaauacauuuaaacauuugggaaaugagggggacaaauggaagccagaucaaauuuguguaaaacuauucaguauguuucccuugcuucaugucugagaaggcucucccuucaauggggaugacaaacuccaaaugccacacaaauguuaacagaauacuagauucacacuggaacggggguaaagaagaaauuauuuucuauaaaagggcuccuaauguaguacugcuugaaaaugguacauuuuuguuguagauuauuuuaaacauaaugcuauaguaauauuuugaagauuugagcuguuauuuccauuuguuuuuacacugugacuaaaugauuagguuuuaguuuuagacucuaaacggaaccugaauuaauaggaaauaaacacgguacuauaguuguccuauggugccccuaugggugauggguuccaagaacccccuaggauacuaaaguccaugauguucaagucccuuauagaaaaugguguaguauuugcauauaaccuaugcacauccuaccauacacuuuaaaucaucucuagauuaccuauaauagcuaauacaauguaaaugcuuuguaaauaguuguuauacuauauuguuuaaugacaaaaaaaaguuuguacauguucagcaaaggcgcaaccauccauuuuuuuccccaaauauuuuugacccacagugggcugaaucacagaugcgaagccuauggacauggagggccaacuggacaagcauaagcaggggauacuuuuuagguugcuacuucagcaggcaacauucagaccauggaagucuagagaaagauuauaaaucugaacuuaccgcuaaaaauuuuaaaaugggaaauaaauccaaggaguuuuuagucaugcauuaugauuuuaaucuauguuaugccaaguacagcauuccaaaauauacaucuagagacuaaaaguaaaugcucuauagugaagaaguaauaauuaaaaaaugcuacuaauauagaaaauuuauaaucagaaaaauaaauauucagggagcucaccagaagaauaaagugcucugccaguuauuaaaggauuacugcuggugaauuaaauauggcauuccccaagggaaacagagagauucuucuggauuauguucaauauuuauuucacaggauuaacuguuuuaggaacagauauaaagcuucgccacggaagagauggacaaagcacaaagacaacaugauaccuuaggaagcaacacuacccuuucaggcauaaaauuuggagaaaugcaacauuaugcuucaugaauaauauguagaaagaaggucugaugaaaaugacauccuuaauguaagauaacuuuauaagaaaucugggucaaauaaaauucuuugaagaaaacauccaaaugucauugacuuaucaaauacuaucuuggcauauaaccuaugaaggcaaaacuaaacaaacaaacaaaaagcucacaccaaacaaaaccaucaacuuauuuuguauucuauaacauacaagacuguaaagaugugacaguguacauuauaugacaaugcacauuagccagcaagucuuuuauaggugguuucagcagcaacgauaaauaaugcagaauucagcuccagcacuuuauuucaaaagaaauuuccugccucccuccaagaugcagggugaggagguagcuugggguugcuauuggagaaguauucaguuugcuacuuugugucaccccuugccauucuuuuauccccaguuaauuauuaucugcauauaauauaaaucugcuagaccauaaauuaacagcuuucaggacagaugccuugaaaguucuuagggagguuaaacaaauauuguagccuaaaaccuccucuauaacaaacaugcacacaauggaagugaugucguaagugagugauggggcaggaaggaccuagggcucugucucgacuauaaaaucaccuugccccaaacaaauuuaaauuauaacuuaggagguucauggacuuucauccauucuggaaacaaagagaaaaaccaaaucaaauaccagaaucuguuuucucacugggcaaauagcaacaggauccacaguuuuaccacaauuguuucccugucuccaugugguaucuacauaauucuuuucccaaaggaggaaaucaaauaacaggccaaucugaguaauuaaacuccccucccaacacuacccaaccucugugaauaaaagcuuuccaaacuuugugaucacauuugaaauugguucacuuauuauugagagaaaaccacaaaaagucucaauuucaucacauccucaaaccaaucuuuuaauuuuuaaaugcagaagaagaaacaaaacgaaacaaaaagaucauucugcaaagagaccucucaacucuucaucagccaguggcauaacucagaaacugauuuaacuaauuuauuauuugagaaaaggggauugaaaaacaauugggggguauaaucuucugauucacaauucccagccacauucuuuucuauuuauucucucucucucuuuuuuuuuuuuuuuuuuuuuuuuuaagagccggagucuugcucugucaccaggcuggagugcaguggugugaucucagcucacugcaacuuccgucuccuggguucaagaauuuuccugccucagccucccaaguacaugggacuacaggcacgccccaccaugcccagcucauuuuuguauuuuuaguagagacaggguuucaccauguuggccaggaugaucuugaucucuugaccucaugauccgcccgucuuggccucccaaagugcugggaucacaggcgugagccaccacaccuggcccucuauuuauucucuuuaaagagagagaaaacuaugagaggccaaaauuauuuaauuaaaucuuuaccuuagcacaagggaaaaaaauggaauuugccuaauauaggugaugaagcauacacaaugaauagaaacaaucacauuuuaguaaaaggcaaaaauuugagacuuauaagcuauaugguagcuuauuuuuggguggggaagaaaugagaaaagaauauaacaucucuuacuggcaugacacauuuugauaaaaaaucuuauuguccuuuccuacuagaaugauccacuguaaggcaaaaauaauauacaagcaaaguuuuuuuuuggagacagagucucacucugucacccaggcuggagugcagugguacgaucuuggcucacugcaaccucucccucccggguucaagugauucucgugccucagccucuugaguagcugggauuacaggcgcgugccacugcguccggcuaauuuuuguauuuuuaguagagaugggguuucaccauguuggccaggcugaucucaaacuccugaccucaugugguccacccaccuuggccucccaaagugcugggauuacaggcgugagccaccgcgcucagccuacaagcaauuuuuuaaaaacugacaccuauuacugauaaaauucucuguuuaaaauccuauuuacuauuuuaaagauaaguauuaguuuuuuuuuaaauacaauaauucuguuauugauaaaauuuaaggcauuuucauugccuuuugcagauuuacucauaacuaccuaacaaggaaagaagguauaauuauuucagauuggauuauuuauucuaaaauuaaauucuucacuaauuuauucuaagaugaauuuaauaguccaucaggaaauugguuuuuauaaagcuuauuuuaugggcauaaaauacaggaaaaaguaauaauaaaugccaaaccgucucuuuacuuuaugaagccaaauauuuccucagacuugguuuuuaaagcuggaauuuauuccuucagggccacuauuauuuuucaaaacuccauauaaauauugaaucuaaaaauuaauuaguaauuuuaauuuuccuuuuucucuucaaauuccuucucuucuccugaacuguugacuuucaaaaauucacagaaugagcauguuucuuacacaggggcuuguccuucuuggagaaaaaggucugaccuuccaaacuuucacaacacacugagcauacaaagcaagugucaugccagguguagcccagagcuuccaggaacaugucaccagcuucuaugggaaauucacauccauggcauauaguaccaaagagggcauaauaaucagucucacaguaggguucaccauccuccaagugaaaaacauuguuccgaaugggcuuuccacaggcuacacacacaaaacaggaaacaugccaaguuuguuucaacgcacugaugacuucuccaaggaucuuccuuuggcaucgaccacauucaggggcaaagaauuucucauagcacagcucacaauacagggcuccuuucuccucuacaaauccaauguaggccauuguauuuuugcagugagcgcaguugaauucuucugggugccaagauuuccccagugccacuaagaaugguccucugaugaccugguuacaaugggcgcacaucggaguucguuucccugcuggaaugugcucagcucuuugcacuaaaguguccuggucacuuggcuggguuugucccaaagcugaguuggcuggugccacugauccugaguaaguagcgcuguuugagauucuuccaguggaagguacuccuugguuuggccguugccagcuuggugacuugaugacgccaguggauccuacaggcuugaaggcagcugcagcugugaggcugguaaccccuggucugccagagguugggcuguccaggcucucgggcaugcuccguguggaagcuaccgaggaagccaacugcggagaaggcuccugagaguuauuugccuucuuuguauuaucggcuucagauucuuucaaauguucagucccagugaucugggcaaggauucggaaagagcgagacugaguuguuccaguccuuggacgccagucuucaguauccucaaucagucucuucuugcuggcaucacugugaguggguacaugauaaaacucuguauagcgcuccacaauguguuuucuuggugggccauuuugcuguuuacugucacccugggauccucuucucugucccucugcuagcuccugagaagucucggaacacacgcuggugacugugggcugccgugggacauuaacugcaguuuuaccagcgcucagugcagauggagacuggucagcacuaagauuggcauuagcaugcaguccagaugcagcgaacaggggaggagugacggcagccacgggugaaggggaagcaugugaugagguggucgcaugggcuggggugaaggcagacgauggugaugggauggaugugacuuuuggugaagacacagaaccaaaaggccguggugccuuauuguaggccauguuguuuguggaagugacuuuggacacagcaggagauguaaugggcacagguuuaacuacuucuuuagguucucccuuuugaacaggaaccggcucaggcuugggugcagcagaugcucuuugcagagucauauucaaagagccuguacaacccuuaaucuuauucugggcuucaagaugagucauuccuugugcauuuauuccaucaaugcugagaaccacaucgccuauucuuacauuugccugggcugccuugccgccaucuuuuagacuagagauugucagaggcauguugaaauccuuaccgcccugcagccggaaaccccaaggagcugggccaaccagugacacacuguaguugcucaugguucuaauggcucaaaguccaaugacagaaaaugaaauaugcuucucacuuauggcaggcuugcuuguuuaacuuuuuguuuccucucuugucauagcucagagccaaaugguuaugaaucagcagaagucugaaccuuuaucaacaaggcaugaaaugaucuuccuuuccuuucacaucuaagaaagaguaggcugaacuccaccccgcggcugcgcucccggcucccgcguccucagcgccgcggucuccgcacugcccggcgucccgcgaggccccgccgacuccgcgccccgcg

SEQ ID NO: 2473 - RNA, 2141 nt, Homo sapiens
ugucagagaauuguuuauuuuacccaguuauacuguaauaaguccuggauggcacugugucuagccucaaggaaacagaacaaguacaaagcuaaguuaaaggcaacuuuauuacaauacuuuuccaaacuucaaaaugcauuuauuacuaaauuuagcucuaauauauaauacacuauauuacaaggcagaaagcauuucuggucauauauuuagcuuccauguauugcccaaaacacagcuuccuaggaauagcagcagugcacaguaguuuacgucacuaaguaaaauauuucucugaugucucacaaucauucauauuguaauuuauuuuauguucuucugauuaaaaaaagcaaagcuaucuuuuccauaucuuauuaguuaauaccuagaaauugucuauauucuaaaaauauccacuagagauauuuccuuugauaggaaauaggauuugcaaauccaaccaaaccaaagaauacuguauuucuccauugcaaauagggguaaaauucucuucuuuccuuuuucaggagccaaaucuggaccuccuccucuucauagagccauccugaauaguaccuacuuuaaaagauaccuaaaucuacaaugcacgcacucuucuuuaauaaagucuuuguuuauucuugccuccuuauauuuacuuauuuagaauaauuuacaaucaacuuugaauguaacauaauaaugaacuuaaaaaguaaucuugggagauguuaauaauauaaagaaaguauuuuccaaauuagacaaggacuuuauuugcucauuauccucugcuucaaccaaccaacuaaccaaauucaacuuaugaaaauaauucguuuuccaagauuacuacccuaaucacaacaaaaacagauacaaauccacaaauagaucuagucccuuaauuuucuauuuuuuuuuuuuuuugguuuuacauuugugagcuaccaacuagcacaaaacauguucaucuuccuuuucucacaacaauaggaaauuguuagaaaaguauagaaaaaguucuauuuuuucauaaggcaaauuuaauacagauuuugcuaugaaguugaaaaaaaaaaaguaaaugaaaagguaugugcuggcugcuuggggggcaaggcucauaaaucacuguacguuaagagcacgugcugaaacuucauggugccagucacguaauuuuguguauuugggacuaaagacgugaagggguaucuuuuccuuugccuucuuuguauuaucggcuucagauucuuucaaauguucagucccagugaucugggcaaggauucggaaagagcgagacugaguuguuccaguccuuggacgccagucuucaguauccucaaucagucucuucuugcuggcaucacugugaguggguacaugauaaaacucuguauagcgcuccacaauguguuuucuuggugggcguuuaggugggauuuucccauuuugcuguuuacugucacccugggauccucuucucugucccucugcuagcuccugagaagucucggaacacacgcuggugacugugggcuuuugaacaggaaccggcucaggcuugggugcagcagaugcucuuugcagagucauauucaaagagccuguacaacccuuaaucuuauucugggcuucaagaugagucauuccuugugcauuuauuccaucaaugcugagaaccacaucgccuauucuuacauuugccugggcugccuugccgccaucuuuuagacuagagauugucagaggcauguugaaauccuuaccgcccugcagccggaaaccccaaggagcugggccaaccagugacacacuguaguugcucaugguucuaauggcucaaaguccaaugacagaaaaugaaauaugcuucucacuuauggcaggcuugcuuguuuaacuuuuuguuuccucucuugucauagcucagagccaaaugguuaugaaucagcagaagucugaaccuuuaucaacaaggcaugaaaugaucuuccuuuccuuucacaucuaagaaagaguaggcugaacuccaccccgcggcugcgcucccggcucccgcguccucagcgccgcggucuccgcacugcccggcgucccgcgaggccccgccgacuccgcgccccgcg

SEQ ID NO: 2474 - RNA, 5922 nt, Homo sapiens
ucauuuacaacaaugcagucauuuauuuauugaguaugugcacauuaugguauuauuacuauacugauuauauuuaucaugugacuucuaauuagaaaauguauccaaaagcaaaacagcagauauacaaaauuaaagagacagaagauagacauuaacagauaaggcaacuuauacauugagaauccaaauccaauacauuuaaacauuugggaaaugagggggacaaauggaagccagaucaaauuuguguaaaacuauucaguauguuucccuugcuucaugucugagaaggcucucccuucaauggggaugacaaacuccaaaugccacacaaauguuaacagaauacuagauucacacuggaacggggguaaagaagaaauuauuuucuauaaaagggcuccuaauguaguacugcuugaaaaugguacauuuuuguuguagauuauuuuaaacauaaugcuauaguaauauuuugaagauuugagcuguuauuuccauuuguuuuuacacugugacuaaaugauuagguuuuaguuuuagacucuaaacggaaccugaauuaauaggaaauaaacacgguacuauaguuguccuauggugccccuaugggugauggguuccaagaacccccuaggauacuaaaguccaugauguucaagucccuuauagaaaaugguguaguauuugcauauaaccuaugcacauccuaccauacacuuuaaaucaucucuagauuaccuauaauagcuaauacaauguaaaugcuuuguaaauaguuguuauacuauauuguuuaaugacaaaaaaaaguuuguacauguucagcaaaggcgcaaccauccauuuuuuuccccaaauauuuuugacccacagugggcugaaucacagaugcgaagccuauggacauggagggccaacuggacaagcauaagcaggggauacuuuuuagguugcuacuucagcaggcaacauucagaccauggaagucuagagaaagauuauaaaucugaacuuaccgcuaaaaauuuuaaaaugggaaauaaauccaaggaguuuuuagucaugcauuaugauuuuaaucuauguuaugccaaguacagcauuccaaaauauacaucuagagacuaaaaguaaaugcucuauagugaagaaguaauaauuaaaaaaugcuacuaauauagaaaauuuauaaucagaaaaauaaauauucagggagcucaccagaagaauaaagugcucugccaguuauuaaaggauuacugcuggugaauuaaauauggcauuccccaagggaaacagagagauucuucuggauuauguucaauauuuauuucacaggauuaacuguuuuaggaacagauauaaagcuucgccacggaagagauggacaaagcacaaagacaacaugauaccuuaggaagcaacacuacccuuucaggcauaaaauuuggagaaaugcaacauuaugcuucaugaauaauauguagaaagaaggucugaugaaaaugacauccuuaauguaagauaacuuuauaagaaaucugggucaaauaaaauucuuugaagaaaacauccaaaugucauugacuuaucaaauacuaucuuggcauauaaccuaugaaggcaaaacuaaacaaacaaacaaaaagcucacaccaaacaaaaccaucaacuuauuuuguauucuauaacauacaagacuguaaagaugugacaguguacauuauaugacaaugcacauuagccagcaagucuuuuauaggugguuucagcagcaacgauaaauaaugcagaauucagcuccagcacuuuauuucaaaagaaauuuccugccucccuccaagaugcagggugaggagguagcuugggguugcuauuggagaaguauucaguuugcuacuuugugucaccccuugccauucuuuuauccccaguuaauuauuaucugcauauaauauaaaucugcuagaccauaaauuaacagcuuucaggacagaugccuugaaaguucuuagggagguuaaacaaauauuguagccuaaaaccuccucuauaacaaacaugcacacaauggaagugaugucguaagugagugauggggcaggaaggaccuagggcucugucucgacuauaaaaucaccuugccccaaacaaauuuaaauuauaacuuaggagguucauggacuuucauccauucuggaaacaaagagaaaaaccaaaucaaauaccagaaucuguuuucucacugggcaaauagcaacaggauccacaguuuuaccacaauuguuucccugucuccaugugguaucuacauaauucuuuucccaaaggaggaaaucaaauaacaggccaaucugaguaauuaaacuccccucccaacacuacccaaccucugugaauaaaagcuuuccaaacuuugugaucacauuugaaauugguucacuuauuauugagagaaaaccacaaaaagucucaauuucaucacauccucaaaccaaucuuuuaauuuuuaaaugcagaagaagaaacaaaacgaaacaaaaagaucauucugcaaagagaccucucaacucuucaucagccaguggcauaacucagaaacugauuuaacuaauuuauuauuugagaaaaggggauugaaaaacaauugggggguauaaucuucugauucacaauucccagccacauucuuuucuauuuauucucucucucucuuuuuuuuuuuuuuuuuuuuuuuuuaagagccggagucuugcucugucaccaggcuggagugcaguggugugaucucagcucacugcaacuuccgucuccuggguucaagaauuuuccugccucagccucccaaguacaugggacuacaggcacgccccaccaugcccagcucauuuuuguauuuuuaguagagacaggguuucaccauguuggccaggaugaucuugaucucuugaccucaugauccgcccgucuuggccucccaaagugcugggaucacaggcgugagccaccacaccuggcccucuauuuauucucuuuaaagagagagaaaacuaugagaggccaaaauuauuuaauuaaaucuuuaccuuagcacaagggaaaaaaauggaauuugccuaauauaggugaugaagcauacacaaugaauagaaacaaucacauuuuaguaaaaggcaaaaauuugagacuuauaagcuauaugguagcuuauuuuuggguggggaagaaaugagaaaagaauauaacaucucuuacuggcaugacacauuuugauaaaaaaucuuauuguccuuuccuacuagaaugauccacuguaaggcaaaaauaauauacaagcaaaguuuuuuuuuggagacagagucucacucugucacccaggcuggagugcagugguacgaucuuggcucacugcaaccucucccucccggguucaagugauucucgugccucagccucuugaguagcugggauuacaggcgcgugccacugcguccggcuaauuuuuguauuuuuaguagagaugggguuucaccauguuggccaggcugaucucaaacuccugaccucaugugguccacccaccuuggccucccaaagugcugggauuacaggcgugagccaccgcgcucagccuacaagcaauuuuuuaaaaacugacaccuauuacugauaaaauucucuguuuaaaauccuauuuacuauuuuaaagauaaguauuaguuuuuuuuuaaauacaauaauucuguuauugauaaaauuuaaggcauuuucauugccuuuugcagauuuacucauaacuaccuaacaaggaaagaagguauaauuauuucagauuggauuauuuauucuaaaauuaaauucuucacuaauuuauucuaagaugaauuuaauaguccaucaggaaauugguuuuuauaaagcuuauuuuaugggcauaaaauacaggaaaaaguaauaauaaaugccaaaccgucucuuuacuuuaugaagccaaauauuuccucagacuugguuuuuaaagcuggaauuuauuccuucagggccacuauuauuuuucaaaacuccauauaaauauugaaucuaaaaauuaauuaguaauuuuaauuuuccuuuuucucuucaaauuccuucucuucuccugaacuguugacuuucaaaaauucacagaaugagcauguuucuuacacaggggcuuguccuucuuggagaaaaaggucugaccuuccaaacuuucacaacacacugagcauacaaagcaagugucaugccagguguagcccagagcuuccaggaacaugucaccagcuucuaugggaaauucacauccauggcauauaguaccaaagagggcauaauaaucagucucacaguaggguucaccauccuccaagugaaaaacauuguuccgaaugggcuuuccacaggcuacacacacaaaacaggaaacaugccaaguuuguuucaacgcacugaugacuucuccaaggaucuuccuuuggcaucgaccacauucaggggcaaagaauuucucauagcacagcucacaauacagggcuccuuucuccucuacaaauccaauguaggccauuguauuuuugcagugagcgcaguugaauucuucugggugccaagauuuccccagugccacuaagaaugguccucugaugaccugguuacaaugggcgcacaucggaguucguuucccugcuggaaugugcucagcucuuugcacuaaaguguccuggucacuuggcuggguuugucccaaagcugaguuggcuggugccacugauccugaguaaguagcgcuguuugagauucuuccaguggaagguacuccuugguuuggccguugccagcuuggugacuugaugacgccaguggauccuacaggcuugaaggcagcugcagcugugaggcugguaaccccuggucugccagagguugggcuguccaggcucucgggcaugcuccguguggaagcuaccgaggaagccaacugcggagaaggcuccugagaguuauuugccuucuuuguauuaucggcuucagauucuuucaaauguucagucccagugaucugggcaaggauucggaaagagcgagacugaguuguuccaguccuuggacgccagucuucaguauccucaaucagucucuucuugcuggcaucacugugaguggguacaugauaaaacucuguauagcgcuccacaauguguuuucuuggugggccauuuugcuguuuacugucacccugggauccucuucucugucccucugcuagcuccugagaagucucggaacacacgcuggugacugugggcuuuugaacaggaaccggcucaggcuugggugcagcagaugcucuuugcagagucauauucaaagagccuguacaacccuuaaucuuauucugggcuucaagaugagucauuccuugugcauuuauuccaucaaugcugagaaccacaucgccuauucuuacauuugccugggcugccuugccgccaucuuuuagacuagagauugucagaggcauguugaaauccuuaccgcccugcagccggaaaccccaaggagcugggccaaccagugacacacuguaguugcucaugguucuaauggcucaaaguccaaugacagaaaaugaaauaugcuucucacuuauggcaggcuugcuuguuuaacuuuuuguuuccucucuugucauagcucagagccaaaugguuaugaaucagcagaagucugaaccuuuaucaacaaggcaugaaaugaucuuccuuuccuuucacaucuaagaaagaguaggcugaacuccaccccgcggcugcgcucccggcucccgcguccucagcgccgcggucuccgcacugcccggcgucccgcgaggccccgccgacuccgcgccccgcg

SEQ ID NO: 2475 - RNA, 6182 nt, Homo sapiens
ucauuuacaacaaugcagucauuuauuuauugaguaugugcacauuaugguauuauuacuauacugauuauauuuaucaugugacuucuaauuagaaaauguauccaaaagcaaaacagcagauauacaaaauuaaagagacagaagauagacauuaacagauaaggcaacuuauacauugagaauccaaauccaauacauuuaaacauuugggaaaugagggggacaaauggaagccagaucaaauuuguguaaaacuauucaguauguuucccuugcuucaugucugagaaggcucucccuucaauggggaugacaaacuccaaaugccacacaaauguuaacagaauacuagauucacacuggaacggggguaaagaagaaauuauuuucuauaaaagggcuccuaauguaguacugcuugaaaaugguacauuuuuguuguagauuauuuuaaacauaaugcuauaguaauauuuugaagauuugagcuguuauuuccauuuguuuuuacacugugacuaaaugauuagguuuuaguuuuagacucuaaacggaaccugaauuaauaggaaauaaacacgguacuauaguuguccuauggugccccuaugggugauggguuccaagaacccccuaggauacuaaaguccaugauguucaagucccuuauagaaaaugguguaguauuugcauauaaccuaugcacauccuaccauacacuuuaaaucaucucuagauuaccuauaauagcuaauacaauguaaaugcuuuguaaauaguuguuauacuauauuguuuaaugacaaaaaaaaguuuguacauguucagcaaaggcgcaaccauccauuuuuuuccccaaauauuuuugacccacagugggcugaaucacagaugcgaagccuauggacauggagggccaacuggacaagcauaagcaggggauacuuuuuagguugcuacuucagcaggcaacauucagaccauggaagucuagagaaagauuauaaaucugaacuuaccgcuaaaaauuuuaaaaugggaaauaaauccaaggaguuuuuagucaugcauuaugauuuuaaucuauguuaugccaaguacagcauuccaaaauauacaucuagagacuaaaaguaaaugcucuauagugaagaaguaauaauuaaaaaaugcuacuaauauagaaaauuuauaaucagaaaaauaaauauucagggagcucaccagaagaauaaagugcucugccaguuauuaaaggauuacugcuggugaauuaaauauggcauuccccaagggaaacagagagauucuucuggauuauguucaauauuuauuucacaggauuaacuguuuuaggaacagauauaaagcuucgccacggaagagauggacaaagcacaaagacaacaugauaccuuaggaagcaacacuacccuuucaggcauaaaauuuggagaaaugcaacauuaugcuucaugaauaauauguagaaagaaggucugaugaaaaugacauccuuaauguaagauaacuuuauaagaaaucugggucaaauaaaauucuuugaagaaaacauccaaaugucauugacuuaucaaauacuaucuuggcauauaaccuaugaaggcaaaacuaaacaaacaaacaaaaagcucacaccaaacaaaaccaucaacuuauuuuguauucuauaacauacaagacuguaaagaugugacaguguacauuauaugacaaugcacauuagccagcaagucuuuuauaggugguuucagcagcaacgauaaauaaugcagaauucagcuccagcacuuuauuucaaaagaaauuuccugccucccuccaagaugcagggugaggagguagcuugggguugcuauuggagaaguauucaguuugcuacuuugugucaccccuugccauucuuuuauccccaguuaauuauuaucugcauauaauauaaaucugcuagaccauaaauuaacagcuuucaggacagaugccuugaaaguucuuagggagguuaaacaaauauuguagccuaaaaccuccucuauaacaaacaugcacacaauggaagugaugucguaagugagugauggggcaggaaggaccuagggcucugucucgacuauaaaaucaccuugccccaaacaaauuuaaauuauaacuuaggagguucauggacuuucauccauucuggaaacaaagagaaaaaccaaaucaaauaccagaaucuguuuucucacugggcaaauagcaacaggauccacaguuuuaccacaauuguuucccugucuccaugugguaucuacauaauucuuuucccaaaggaggaaaucaaauaacaggccaaucugaguaauuaaacuccccucccaacacuacccaaccucugugaauaaaagcuuuccaaacuuugugaucacauuugaaauugguucacuuauuauugagagaaaaccacaaaaagucucaauuucaucacauccucaaaccaaucuuuuaauuuuuaaaugcagaagaagaaacaaaacgaaacaaaaagaucauucugcaaagagaccucucaacucuucaucagccaguggcauaacucagaaacugauuuaacuaauuuauuauuugagaaaaggggauugaaaaacaauugggggguauaaucuucugauucacaauucccagccacauucuuuucuauuuauucucucucucucuuuuuuuuuuuuuuuuuuuuuuuuuaagagccggagucuugcucugucaccaggcuggagugcaguggugugaucucagcucacugcaacuuccgucuccuggguucaagaauuuuccugccucagccucccaaguacaugggacuacaggcacgccccaccaugcccagcucauuuuuguauuuuuaguagagacaggguuucaccauguuggccaggaugaucuugaucucuugaccucaugauccgcccgucuuggccucccaaagugcugggaucacaggcgugagccaccacaccuggcccucuauuuauucucuuuaaagagagagaaaacuaugagaggccaaaauuauuuaauuaaaucuuuaccuuagcacaagggaaaaaaauggaauuugccuaauauaggugaugaagcauacacaaugaauagaaacaaucacauuuuaguaaaaggcaaaaauuugagacuuauaagcuauaugguagcuuauuuuuggguggggaagaaaugagaaaagaauauaacaucucuuacuggcaugacacauuuugauaaaaaaucuuauuguccuuuccuacuagaaugauccacuguaaggcaaaaauaauauacaagcaaaguuuuuuuuuggagacagagucucacucugucacccaggcuggagugcagugguacgaucuuggcucacugcaaccucucccucccggguucaagugauucucgugccucagccucuugaguagcugggauuacaggcgcgugccacugcguccggcuaauuuuuguauuuuuaguagagaugggguuucaccauguuggccaggcugaucucaaacuccugaccucaugugguccacccaccuuggccucccaaagugcugggauuacaggcgugagccaccgcgcucagccuacaagcaauuuuuuaaaaacugacaccuauuacugauaaaauucucuguuuaaaauccuauuuacuauuuuaaagauaaguauuaguuuuuuuuuaaauacaauaauucuguuauugauaaaauuuaaggcauuuucauugccuuuugcagauuuacucauaacuaccuaacaaggaaagaagguauaauuauuucagauuggauuauuuauucuaaaauuaaauucuucacuaauuuauucuaagaugaauuuaauaguccaucaggaaauugguuuuuauaaagcuuauuuuaugggcauaaaauacaggaaaaaguaauaauaaaugccaaaccgucucuuuacuuuaugaagccaaauauuuccucagacuugguuuuuaaagcuggaauuuauuccuucagggccacuauuauuuuucaaaacuccauauaaauauugaaucuaaaaauuaauuaguaauuuuaauuuuccuuuuucucuucaaauuccuucucuucuccugaacuguugacuuucaaaaauucacagaaugagcauguuucuuacacaggggcuuguccuucuuggagaaaaaggucugaccuuccaaacuuucacaacacacugagcauacaaagcaagugucaugccagguguagcccagagcuuccaggaacaugucaccagcuucuaugggaaauucacauccauggcauauaguaccaaagagggcauaauaaucagucucacaguaggguucaccauccuccaagugaaaaacauuguuccgaaugggcuuuccacaggcuacacacacaaaacaggaaacaugccaaguuuguuucaacgcacugaugacuucuccaaggaucuuccuuuggcaucgaccacauucaggggcaaagaauuucucauagcacagcucacaauacagggcuccuuucuccucuacaaauccaauguaggccauuguauuuuugcagugagcgcaguugaauucuucugggugccaagauuuccccagugccacuaagaaugguccucugaugaccugguuacaaugggcgcacaucggaguucguuucccugcuggaaugugcucagcucuuugcacuaaaguguccuggucacuuggcuggguuugucccaaagcugaguuggcuggugccacugauccugaguaaguagcgcuguuugagauucuuccaguggaagguacuccuugguuuggccguugccagcuuggugacuugaugacgccaguggauccuacaggcuugaaggcagcugcagcugugaggcugguaaccccuggucugccagagguugggcuguccaggcucucgggcaugcuccguguggaagcuaccgaggaagccaacugcggagaaggcuccugagaguuauuugccuucuuuguauuaucggcuucagauucuuucaaauguucagucccagugaucugggcaaggauucggaaagagcgagacugaguuguuccaguccuuggacgccagucuucaguauccucaaucagucucuucuugcuggcaucacugugaguggguacaugauaaaacucuguauagcgcuccacaauguguuuucuuggugggccauuuugcuguuuacugucacccugggauccucuucucugucccucugcuagcuccugagaagucucggaacacacgcuggugacugugggcuuuugaacaggaaccggcucaggcuugggugcagcagaugcucuuugcagagucauauucaaagagccuguacaacccuuaaucuuauucugggcuucaagaugagucauuccuugugcauuuauuccaucaaugcugagaaccacaucgccuauucuuacauuugccugggcugccuugccgccaucuuuuagcagcagagggaggccugauccacuuccugagcucugagacugcucaauuaagucucucagggauucuccaggaggaauguaaguuucauccuguucuaacccaaugcuguaucgaggucugguuucuugucuuuuauaccggaaguaacaaaauaauaugauaaggaccaagagcaaacuacagacagucacagauauaaguaaagcccugugguguauagguccaucaacaaaaucucuguuuuucaauggaggcaguguaggguguaggucuuuauuacauucguuccuuucugugcagcauucaauugaucuucuuugaugaggaaugggagugucccgacacugaaaaucugagccuucuaguccuaggcaaccagaagugaccacaggcaacccagagucauccucuucuaucaucgugaaacaauauccgucugugcugcaaauauuguugacugagucuucuggacaauggugguggcauuuacaacgcaagaccuuuggacggggggugggggcuguacucucaccauccucuuucuuggugcccacauuuaauuuuccugcacuucgcaaaagcauguuaucaaggaaguuugcugaaagaagaaauagugagaguuaggcaucugugggguagacuaccccaguc

SEQ ID NO: 2476-2501 - skipped (26 entries)

SEQ ID NO: 2502 - RNA, 1713 nt, Homo sapiens
aaggauauuacaacaagaacuuuacugguaacaccuuuuuaauaggucaaaguaacuguacaguucauuauauucuuccugagaauaauuuauaucccccaacaaacuaaagggaggguauauuuuuucaaaauuaacagaauggaugguguaacuggacaucaaaagaaaaccaaauuccuguuuugcuucauucucuccugggaagacagauacaaggaaggguuaguuaacuccaguggcuguaaaauagucaacauggcuuuaaucuuucuuuauaaauuauauaaaaauggaaaaaggggaugguucuggaacuucuccucaaugcaguuuggaggugcucugguacaaagcauuucugcuuccaagagaaauaacauugcuacaaaaaacuggcacauuauucugugaaaaaagacaugaguuuuuaguuguguucuacagcuaguucccgacccaaugcuucacauauccacacgaaaguaaaaggcagguaagacaaaaagggcuguaguuuuuucugaaauaacucaagucuucaaaauauagcuuuuauauucuuuguaaagugggauuagcauauugcaacugaaggguguucuaacaaacaaaaauuccagucuggauaauaauucuaugguagacaaaagaauucucagccucuuggguuuccuggaauucuuugcuucaugcucuccucuuccacuaugcagcuaagguaguuuaggaauuaagaugucaccccuuggccaucccccuuuagaacguaucuuaaugugaacauaaauuguucuucaugaugcuuaaaagcuuacauauaauuuucauucuuagaaaaacgccacauuuuggauccuggauuuuucugaauaucaugauugaaaaaaacaaaacaaaaaaugaacccaaaucaaagugugguuaaacuuauaugagaaagauuuuucaaccagauggucauucaaaaaaguuggagcuguaagugcuggcgacugaggacacaggguuaauuccucgcugcugguggaaggcuagagaacaucuucaaaagaggguagcaagacgugcuccuaggggaggcucaguguggucucgucugcccaagcauuuucagucuugcuuggucaaugacaucgaguaaguuuuuggcauccacagccagggcgugagcagcagucagcauuugcuuuuuguacucuugcuggaggcuggucaugacauacugcugggccaguuucaucuuguugaugagcucacccaggucagaguucaauagcuucugugccaucucaaucucucggugggugcuggcugguaggaggggaauggucucauccacaguggccaauaauguccucagggccaagccgacuuccuucaccauagggacauacuccucugguggggcuggcuggauuuuacuggacaucucgaugacagcuuucaccaggcccgucacauucucguacaccuuaucauucgaccgguccagguuggcaguaggaggggggcugauuuccuggggcugaagccuccauggcuugacacccucguuguagcugucagcagggcugcugaggcuggcaaggcuucccagaugaccgggagcuccagggcgaggcgguuucuuugguggagcugcaggaucggggccggcucccgaguacaugguggcgccgccgaggggcuccggggccgaggggcggccgc

SEQ ID NO: 2503 - RNA, 2889 nt, Homo sapiens
aaggauauuacaacaagaacuuuacugguaacaccuuuuuaauaggucaaaguaacuguacaguucauuauauucuuccugagaauaauuuauaucccccaacaaacuaaagggaggguauauuuuuucaaaauuaacagaauggaugguguaacuggacaucaaaagaaaaccaaauuccuguuuugcuucauucucuccugggaagacagauacaaggaaggguuaguuaacuccaguggcuguaaaauagucaacauggcuuuaaucuuucuuuauaaauuauauaaaaauggaaaaaggggaugguucuggaacuucuccucaaugcaguuuggaggugcucugguacaaagcauuucugcuuccaagagaaauaacauugcuacaaaaaacuggcacauuauucugugaaaaaagacaugaguuuuuaguuguguucuacagcuaguucccgacccaaugcuucacauauccacacgaaaguaaaaggcagguaagacaaaaagggcuguaguuuuuucugaaauaacucaagucuucaaaauauagcuuuuauauucuuuguaaagugggauuagcauauugcaacugaaggguguucuaacaaacaaaaauuccagucuggauaauaauucuaugguagacaaaagaauucucagccucuuggguuuccuggaauucuuugcuucaugcucuccucuuccacuaugcagcuaagguaguuuaggaauuaagaugucaccccuuggccaucccccuuuagaacguaucuuaaugugaacauaaauuguucuucaugaugcuuaaaagcuuacauauaauuuucauucuuagaaaaacgccacauuuuggauccuggauuuuucugaauaucaugauugaaaaaaacaaaacaaaaaaugaacccaaaucaaagugugguuaaacuuauaugagaaagauuuuucaaccagauggucauucaaaaaaguuggagcuguaagugcuggcgacugaggacacaggguuaauuccucgcugcugguggaaggcuagagaacaucuucaaaagaggguagcaagacgugcuccuaggggaggcucaguguggucucgucugcccaagcauuuucagucuugcuuggucaaugacaucgaguaaguuuuuggcauccacagccagggcgugagcagcagucagcauuugcuuuuuguacucuugcuggaggcuggucaugacauacugcugggccaguuucaucuuguugaugagcucacccaggucagaguucaauagcuucugugccaucucaaucucucggugggugcuggcugguaggaggggaauggucucauccacaguggccaauaauguccucagggccaagccgacuuccuucaccauagggacauacuccucugguggggcuggcuggauuuuacuggacaucucgaugacagcuuucaccaggcccgucacauucucguacaccuuaucauucgaccgguccagguuggcaguaggaggggggcugauuuccuggggcugaagcuugacacccucguuguagcugucagcagggcugcugaggcuggcaaggcuucccagaugaccgggagcuccagggcgaggcgguuucuuugguggagcugcaggaucugguuuacccacaggcugauauauauguugguuuccaaucggacccugaagacuuccauccucccugucaauacugccucgagagagucucacaucagguuucagaaaucuuuccucuuuuuccagccagcgcugaucuucuuccauuuccuguugcugucggauuagacgcucuuccaucagauggguuggcaacacuugcccaaucccucgcagguccaauacuguagaguccuccacauugggcugccacauugcuaucuccugaggucuaugauuccaugaaucuguuugguccaaaagagaugccugaccuggauagaugcugccagccauggcugugauuccaugugaaccaggguagccagaaaccugguaaugauugguuuguaccaugugcugugggcugggauaaaauccuucgcuggaccucggacugggauaacccggucugcugggcuugggcggugcuucaucagacccuccggagucccaggacacuguggccugucuucuggacuccauccucaugcgcucuucuugcugagccuucucuuccuccaggauugugcugagcugagcuuuaaguucaguaaaccugggccgccugcuggggucauaggcccagcauuucgucauaaggcuguagaggguaggaggacaauuuggaggcauugguaaucuuuccccauuuucaauucgaccgauuacaucauuguucuucacuccuugaaaaggcuucacaccaugcaucaguaucucccacauacacacaccaaacauccauacgucacuagcugagguaaaacgucgaaaauugauugacucuggagccauccauuuaauaggcaauuuuccuuuggaagcuuuguaguaaguacuaucuuccauauaucgggauaauccaaagucuccuaauuuuacacaaucauuugaggacaccagaacauuccgagcagcaaugucccuguguacaaaucuuuugcucucuagauaugcaagagcuguacuaagcugauaggcauacaggaucaaagaugcuagauccaaacuguauuuccuuacuugcaaaaaugaccucagcucuccaagugugcacagcuccaugauuauccagacaggauucucugugaugacuccaaucagcuucacaauaugaggauggucaaacugacgcauuguuacggggccggcucccgaguacaugguggcgccgccgaggggcuccggggccgaggggcggccgc

SEQ ID NO: 2504 - RNA, 2898 nt, Homo sapiens
aaggauauuacaacaagaacuuuacugguaacaccuuuuuaauaggucaaaguaacuguacaguucauuauauucuuccugagaauaauuuauaucccccaacaaacuaaagggaggguauauuuuuucaaaauuaacagaauggaugguguaacuggacaucaaaagaaaaccaaauuccuguuuugcuucauucucuccugggaagacagauacaaggaaggguuaguuaacuccaguggcuguaaaauagucaacauggcuuuaaucuuucuuuauaaauuauauaaaaauggaaaaaggggaugguucuggaacuucuccucaaugcaguuuggaggugcucugguacaaagcauuucugcuuccaagagaaauaacauugcuacaaaaaacuggcacauuauucugugaaaaaagacaugaguuuuuaguuguguucuacagcuaguucccgacccaaugcuucacauauccacacgaaaguaaaaggcagguaagacaaaaagggcuguaguuuuuucugaaauaacucaagucuucaaaauauagcuuuuauauucuuuguaaagugggauuagcauauugcaacugaaggguguucuaacaaacaaaaauuccagucuggauaauaauucuaugguagacaaaagaauucucagccucuuggguuuccuggaauucuuugcuucaugcucuccucuuccacuaugcagcuaagguaguuuaggaauuaagaugucaccccuuggccaucccccuuuagaacguaucuuaaugugaacauaaauuguucuucaugaugcuuaaaagcuuacauauaauuuucauucuuagaaaaacgccacauuuuggauccuggauuuuucugaauaucaugauugaaaaaaacaaaacaaaaaaugaacccaaaucaaagugugguuaaacuuauaugagaaagauuuuucaaccagauggucauucaaaaaaguuggagcuguaagugcuggcgacugaggacacaggguuaauuccucgcugcugguggaaggcuagagaacaucuucaaaagaggguagcaagacgugcuccuaggggaggcucaguguggucucgucugcccaagcauuuucagucuugcuuggucaaugacaucgaguaaguuuuuggcauccacagccagggcgugagcagcagucagcauuugcuuuuuguacucuugcuggaggcuggucaugacauacugcugggccaguuucaucuuguugaugagcucacccaggucagaguucaauagcuucugugccaucucaaucucucggugggugcuggcugguaggaggggaauggucucauccacaguggccaauaauguccucagggccaagccgacuuccuucaccauagggacauacuccucugguggggcuggcuggauuuuacuggacaucucgaugacagcuuucaccaggcccgucacauucucguacaccuuaucauucgaccgguccagguuggcaguaggaggggggcugauuuccuggggcugaagccuccauggcuugacacccucguuguagcugucagcagggcugcugaggcuggcaaggcuucccagaugaccgggagcuccagggcgaggcgguuucuuugguggagcugcaggaucugguuuacccacaggcugauauauauguugguuuccaaucggacccugaagacuuccauccucccugucaauacugccucgagagagucucacaucagguuucagaaaucuuuccucuuuuuccagccagcgcugaucuucuuccauuuccuguugcugucggauuagacgcucuuccaucagauggguuggcaacacuugcccaaucccucgcagguccaauacuguagaguccuccacauugggcugccacauugcuaucuccugaggucuaugauuccaugaaucuguuugguccaaaagagaugccugaccuggauagaugcugccagccauggcugugauuccaugugaaccaggguagccagaaaccugguaaugauugguuuguaccaugugcugugggcugggauaaaauccuucgcuggaccucggacugggauaacccggucugcugggcuugggcggugcuucaucagacccuccggagucccaggacacuguggccugucuucuggacuccauccucaugcgcucuucuugcugagccuucucuuccuccaggauugugcugagcugagcuuuaaguucaguaaaccugggccgccugcuggggucauaggcccagcauuucgucauaaggcuguagaggguaggaggacaauuuggaggcauugguaaucuuuccccauuuucaauucgaccgauuacaucauuguucuucacuccuugaaaaggcuucacaccaugcaucaguaucucccacauacacacaccaaacauccauacgucacuagcugagguaaaacgucgaaaauugauugacucuggagccauccauuuaauaggcaauuuuccuuuggaagcuuuguaguaaguacuaucuuccauauaucgggauaauccaaagucuccuaauuuuacacaaucauuugaggacaccagaacauuccgagcagcaaugucccuguguacaaaucuuuugcucucuagauaugcaagagcuguacuaagcugauaggcauacaggaucaaagaugcuagauccaaacuguauuuccuuacuugcaaaaaugaccucagcucuccaagugugcacagcuccaugauuauccagacaggauucucugugaugacuccaaucagcuucacaauaugaggauggucaaacugacgcauuguuacggggccggcucccgaguacaugguggcgccgccgaggggcuccggggccgaggggcggccgc

SEQ ID NO: 2505 - RNA, 2826 nt, Homo sapiens
aaggauauuacaacaagaacuuuacugguaacaccuuuuuaauaggucaaaguaacuguacaguucauuauauucuuccugagaauaauuuauaucccccaacaaacuaaagggaggguauauuuuuucaaaauuaacagaauggaugguguaacuggacaucaaaagaaaaccaaauuccuguuuugcuucauucucuccugggaagacagauacaaggaaggguuaguuaacuccaguggcuguaaaauagucaacauggcuuuaaucuuucuuuauaaauuauauaaaaauggaaaaaggggaugguucuggaacuucuccucaaugcaguuuggaggugcucugguacaaagcauuucugcuuccaagagaaauaacauugcuacaaaaaacuggcacauuauucugugaaaaaagacaugaguuuuuaguuguguucuacagcuaguucccgacccaaugcuucacauauccacacgaaaguaaaaggcagguaagacaaaaagggcuguaguuuuuucugaaauaacucaagucuucaaaauauagcuuuuauauucuuuguaaagugggauuagcauauugcaacugaaggguguucuaacaaacaaaaauuccagucuggauaauaauucuaugguagacaaaagaauucucagccucuuggguuuccuggaauucuuugcuucaugcucuccucuuccacuaugcagcuaagguaguuuaggaauuaagaugucaccccuuggccaucccccuuuagaacguaucuuaaugugaacauaaauuguucuucaugaugcuuaaaagcuuacauauaauuuucauucuuagaaaaacgccacauuuuggauccuggauuuuucugaauaucaugauugaaaaaaacaaaacaaaaaaugaacccaaaucaaagugugguuaaacuuauaugagaaagauuuuucaaccagauggucauucaaaaaaguuggagcuguaagugcuggcgacugaggacacaggguuaauuccucgcugcugguggaaggcuagagaacaucuucaaaagaggguagcaagacgugcuccuaggggaggcucaguguggucucgucugcccaagcauuuucagucuugcuuggucaaugacaucgaguaaguuuuuggcauccacagccagggcgugagcagcagucagcauuugcuuuuuguacucuugcuggaggcuggucaugacauacugcugggccaguuucaucuuguugaugagcucacccaggucagaguucaauagcuucugugccaucucaaucucucggugggugcuggcugguaggaggggaauggucucauccacaguggccaauaauguccucagggccaagccgacuuccuucaccauagggacauacuccucugguggggcuggcuggauuuuacuggacaucucgaugacagcuuucaccaggcccgucacauucucguacaccuuaucauucgaccgguccagguuggcaguaggaggggggcugauuuccuggggcugaagcuugacacccucguuguagcugucagcagggcugcugaggcuggcaaggcuucccagaugaccgggagcuccagggcgaggcgguuucuuugguggagcugcaggaucugguuuacccacaggcugauauauauguugguuuccaaucagaaaucuuuccucuuuuuccagccagcgcugaucuucuuccauuuccuguugcugucggauuagacgcucuuccaucagauggguuggcaacacuugcccaaucccucgcagguccaauacuguagaguccuccacauugggcugccacauugcuaucuccugaggucuaugauuccaugaaucuguuugguccaaaagagaugccugaccuggauagaugcugccagccauggcugugauuccaugugaaccaggguagccagaaaccugguaaugauugguuuguaccaugugcugugggcugggauaaaauccuucgcuggaccucggacugggauaacccggucugcugggcuugggcggugcuucaucagacccuccggagucccaggacacuguggccugucuucuggacuccauccucaugcgcucuucuugcugagccuucucuuccuccaggauugugcugagcugagcuuuaaguucaguaaaccugggccgccugcuggggucauaggcccagcauuucgucauaaggcuguagaggguaggaggacaauuuggaggcauugguaaucuuuccccauuuucaauucgaccgauuacaucauuguucuucacuccuugaaaaggcuucacaccaugcaucaguaucucccacauacacacaccaaacauccauacgucacuagcugagguaaaacgucgaaaauugauugacucuggagccauccauuuaauaggcaauuuuccuuuggaagcuuuguaguaaguacuaucuuccauauaucgggauaauccaaagucuccuaauuuuacacaaucauuugaggacaccagaacauuccgagcagcaaugucccuguguacaaaucuuuugcucucuagauaugcaagagcuguacuaagcugauaggcauacaggaucaaagaugcuagauccaaacuguauuuccuuacuugcaaaaaugaccucagcucuccaagugugcacagcuccaugauuauccagacaggauucucugugaugacuccaaucagcuucacaauaugaggauggucaaacugacgcauuguuacggggccggcucccgaguacaugguggcgccgccgaggggcuccggggccgaggggcggccgc

SEQ ID NO: 2506 - RNA, 1704 nt, Homo sapiens
aaggauauuacaacaagaacuuuacugguaacaccuuuuuaauaggucaaaguaacuguacaguucauuauauucuuccugagaauaauuuauaucccccaacaaacuaaagggaggguauauuuuuucaaaauuaacagaauggaugguguaacuggacaucaaaagaaaaccaaauuccuguuuugcuucauucucuccugggaagacagauacaaggaaggguuaguuaacuccaguggcuguaaaauagucaacauggcuuuaaucuuucuuuauaaauuauauaaaaauggaaaaaggggaugguucuggaacuucuccucaaugcaguuuggaggugcucugguacaaagcauuucugcuuccaagagaaauaacauugcuacaaaaaacuggcacauuauucugugaaaaaagacaugaguuuuuaguuguguucuacagcuaguucccgacccaaugcuucacauauccacacgaaaguaaaaggcagguaagacaaaaagggcuguaguuuuuucugaaauaacucaagucuucaaaauauagcuuuuauauucuuuguaaagugggauuagcauauugcaacugaaggguguucuaacaaacaaaaauuccagucuggauaauaauucuaugguagacaaaagaauucucagccucuuggguuuccuggaauucuuugcuucaugcucuccucuuccacuaugcagcuaagguaguuuaggaauuaagaugucaccccuuggccaucccccuuuagaacguaucuuaaugugaacauaaauuguucuucaugaugcuuaaaagcuuacauauaauuuucauucuuagaaaaacgccacauuuuggauccuggauuuuucugaauaucaugauugaaaaaaacaaaacaaaaaaugaacccaaaucaaagugugguuaaacuuauaugagaaagauuuuucaaccagauggucauucaaaaaaguuggagcuguaagugcuggcgacugaggacacaggguuaauuccucgcugcugguggaaggcuagagaacaucuucaaaagaggguagcaagacgugcuccuaggggaggcucaguguggucucgucugcccaagcauuuucagucuugcuuggucaaugacaucgaguaaguuuuuggcauccacagccagggcgugagcagcagucagcauuugcuuuuuguacucuugcuggaggcuggucaugacauacugcugggccaguuucaucuuguugaugagcucacccaggucagaguucaauagcuucugugccaucucaaucucucggugggugcuggcugguaggaggggaauggucucauccacaguggccaauaauguccucagggccaagccgacuuccuucaccauagggacauacuccucugguggggcuggcuggauuuuacuggacaucucgaugacagcuuucaccaggcccgucacauucucguacaccuuaucauucgaccgguccagguuggcaguaggaggggggcugauuuccuggggcugaagcuugacacccucguuguagcugucagcagggcugcugaggcuggcaaggcuucccagaugaccgggagcuccagggcgaggcgguuucuuugguggagcugcaggaucggggccggcucccgaguacaugguggcgccgccgaggggcuccggggccgaggggcggccgc

SEQ ID NO: 2507 - RNA, 2751 nt, Homo sapiens
aaggauauuacaacaagaacuuuacugguaacaccuuuuuaauaggucaaaguaacuguacaguucauuauauucuuccugagaauaauuuauaucccccaacaaacuaaagggaggguauauuuuuucaaaauuaacagaauggaugguguaacuggacaucaaaagaaaaccaaauuccuguuuugcuucauucucuccugggaagacagauacaaggaaggguuaguuaacuccaguggcuguaaaauagucaacauggcuuuaaucuuucuuuauaaauuauauaaaaauggaaaaaggggaugguucuggaacuucuccucaaugcaguuuggaggugcucugguacaaagcauuucugcuuccaagagaaauaacauugcuacaaaaaacuggcacauuauucugugaaaaaagacaugaguuuuuaguuguguucuacagcuaguucccgacccaaugcuucacauauccacacgaaaguaaaaggcagguaagacaaaaagggcuguaguuuuuucugaaauaacucaagucuucaaaauauagcuuuuauauucuuuguaaagugggauuagcauauugcaacugaaggguguucuaacaaacaaaaauuccagucuggauaauaauucuaugguagacaaaagaauucucagccucuuggguuuccuggaauucuuugcuucaugcucuccucuuccacuaugcagcuaagguaguuuaggaauuaagaugucaccccuuggccaucccccuuuagaacguaucuuaaugugaacauaaauuguucuucaugaugcuuaaaagcuuacauauaauuuucauucuuagaaaaacgccacauuuuggauccuggauuuuucugaauaucaugauugaaaaaaacaaaacaaaaaaugaacccaaaucaaagugugguuaaacuuauaugagaaagauuuuucaaccagauggucauucaaaaaaguuggagcuguaagugcuggcgacugaggacacaggguuaauuccucgcugcugguggaaggcuagagaacaucuucaaaagaggguagcaagacgugcuccuaggggaggcucaguguggucucgucugcccaagcauuuucagucuugcuuggucaaugacaucgaguaaguuuuuggcauccacagccagggcgugagcagcagucagcauuugcuuuuuguacucuugcuggaggcuggucaugacauacugcugggccaguuucaucuuguugaugagcucacccaggucagaguucaauagcuucugugccaucucaaucucucggugggugcuggcugguaggaggggaauggucucauccacaguggccaauaauguccucagggccaagccgacuuccuucaccauagggacauacuccucugguggggcuggcuggauuuuacuggacaucucgaugacagcuuucaccaggcccgucacauucucguacaccuuaucauucgaccgguccagguuggcaguaggaggggggcugauuuccuggggcugaagcuugacacccucguuguagcugucagcagggcugcugaggcuggcaaggcuucccagaugaccgggagcuccagggcgaggcgguuucuuugguggagcugcaggaucugguuuacccacaggcugauauauauguugguuuccaaucggacccugaagacuuccauccucccugucaauacugccucgagagagucucacaucagguuucagaaaucuuuccucuuuuuccagccagcgcugaucuucuuccauuuccuguugcugucggauuagacgcucuuccaucagauggguuggcaacacuugcccaaucccucgcagguccaauacuguagaguccugguaaugauugguuuguaccaugugcugugggcugggauaaaauccuucgcuggaccucggacugggauaacccggucugcugggcuugggcggugcuucaucagacccuccggagucccaggacacuguggccugucuucuggacuccauccucaugcgcucuucuugcugagccuucucuuccuccaggauugugcugagcugagcuuuaaguucaguaaaccugggccgccugcuggggucauaggcccagcauuucgucauaaggcuguagaggguaggaggacaauuuggaggcauugguaaucuuuccccauuuucaauucgaccgauuacaucauuguucuucacuccuugaaaaggcuucacaccaugcaucaguaucucccacauacacacaccaaacauccauacgucacuagcugagguaaaacgucgaaaauugauugacucuggagccauccauuuaauaggcaauuuuccuuuggaagcuuuguaguaaguacuaucuuccauauaucgggauaauccaaagucuccuaauuuuacacaaucauuugaggacaccagaacauuccgagcagcaaugucccuguguacaaaucuuuugcucucuagauaugcaagagcuguacuaagcugauaggcauacaggaucaaagaugcuagauccaaacuguauuuccuuacuugcaaaaaugaccucagcucuccaagugugcacagcuccaugauuauccagacaggauucucugugaugacuccaaucagcuucacaauaugaggauggucaaacugacgcauuguuacggggccggcucccgaguacaugguggcgccgccgaggggcuccggggccgaggggcggccgc

SEQ ID NO: 2508 - RNA, 2928 nt, Homo sapiens
aaggauauuacaacaagaacuuuacugguaacaccuuuuuaauaggucaaaguaacuguacaguucauuauauucuuccugagaauaauuuauaucccccaacaaacuaaagggaggguauauuuuuucaaaauuaacagaauggaugguguaacuggacaucaaaagaaaaccaaauuccuguuuugcuucauucucuccugggaagacagauacaaggaaggguuaguuaacuccaguggcuguaaaauagucaacauggcuuuaaucuuucuuuauaaauuauauaaaaauggaaaaaggggaugguucuggaacuucuccucaaugcaguuuggaggugcucugguacaaagcauuucugcuuccaagagaaauaacauugcuacaaaaaacuggcacauuauucugugaaaaaagacaugaguuuuuaguuguguucuacagcuaguucccgacccaaugcuucacauauccacacgaaaguaaaaggcagguaagacaaaaagggcuguaguuuuuucugaaauaacucaagucuucaaaauauagcuuuuauauucuuuguaaagugggauuagcauauugcaacugaaggguguucuaacaaacaaaaauuccagucuggauaauaauucuaugguagacaaaagaauucucagccucuuggguuuccuggaauucuuugcuucaugcucuccucuuccacuaugcagcuaagguaguuuaggaauuaagaugucaccccuuggccaucccccuuuagaacguaucuuaaugugaacauaaauuguucuucaugaugcuuaaaagcuuacauauaauuuucauucuuagaaaaacgccacauuuuggauccuggauuuuucugaauaucaugauugaaaaaaacaaaacaaaaaaugaacccaaaucaaagugugguuaaacuuauaugagaaagauuuuucaaccagauggucauucaaaaaaguuggagcuguaagugcuggcgacugaggacacaggguuaauuccucgcugcugguggaaggcuagagaacaucuucaaaagaggguagcaagacgugcuccuaggggaggcucaguguggucucgucugcccaagcauuuucagucuugcuuggucaaugacaucgaguaaguuuuuggcauccacagccagggcgugagcagcagucagcauuugcuuuuuguacucuugcuggaggcuggucaugacauacugcugggccaguuucaucuuguugaugagcucacccaggucagaguucaauagcuucugugccaucucaaucucucggugggugcuggcugguaggaggggaauggucucauccacaguggccaauaauguccucagggccaagccgacuuccuucaccauagggacauacuccucugguggggcuggcuggauuuuacuggacaucucgaugacagcuuucaccaggcccgucacauucucguacaccuuaucauucgaccgguccagguuggcaguaggaggggggcugauuuccuggggcugaagccuccauggcuugacacccucguuguagcugucagcagggcugcugaggcuggcaaggcuucccagaugaccgggagcuccagggcgaggcgguuucuuugguggagcugcaggauuucuuuccgcccaauucuuuucuucuuuaccugguuuacccacaggcugauauauauguugguuuccaaucggacccugaagacuuccauccucccugucaauacugccucgagagagucucacaucagguuucagaaaucuuuccucuuuuuccagccagcgcugaucuucuuccauuuccuguugcugucggauuagacgcucuuccaucagauggguuggcaacacuugcccaaucccucgcagguccaauacuguagaguccuccacauugggcugccacauugcuaucuccugaggucuaugauuccaugaaucuguuugguccaaaagagaugccugaccuggauagaugcugccagccauggcugugauuccaugugaaccaggguagccagaaaccugguaaugauugguuuguaccaugugcugugggcugggauaaaauccuucgcuggaccucggacugggauaacccggucugcugggcuugggcggugcuucaucagacccuccggagucccaggacacuguggccugucuucuggacuccauccucaugcgcucuucuugcugagccuucucuuccuccaggauugugcugagcugagcuuuaaguucaguaaaccugggccgccugcuggggucauaggcccagcauuucgucauaaggcuguagaggguaggaggacaauuuggaggcauugguaaucuuuccccauuuucaauucgaccgauuacaucauuguucuucacuccuugaaaaggcuucacaccaugcaucaguaucucccacauacacacaccaaacauccauacgucacuagcugagguaaaacgucgaaaauugauugacucuggagccauccauuuaauaggcaauuuuccuuuggaagcuuuguaguaaguacuaucuuccauauaucgggauaauccaaagucuccuaauuuuacacaaucauuugaggacaccagaacauuccgagcagcaaugucccuguguacaaaucuuuugcucucuagauaugcaagagcuguacuaagcugauaggcauacaggaucaaagaugcuagauccaaacuguauuuccuuacuugcaaaaaugaccucagcucuccaagugugcacagcuccaugauuauccagacaggauucucugugaugacuccaaucagcuucacaauaugaggauggucaaacugacgcauuguuacggggccggcucccgaguacaugguggcgccgccgaggggcuccggggccgaggggcggccgc

SEQ ID NO: 2509 - RNA, 2276 nt, Homo sapiens
aaggauauuacaacaagaacuuuacugguaacaccuuuuuaauaggucaaaguaacuguacaguucauuauauucuuccugagaauaauuuauaucccccaacaaacuaaagggaggguauauuuuuucaaaauuaacagaauggaugguguaacuggacaucaaaagaaaaccaaauuccuguuuugcuucauucucuccugggaagacagauacaaggaaggguuaguuaacuccaguggcuguaaaauagucaacauggcuuuaaucuuucuuuauaaauuauauaaaaauggaaaaaggggaugguucuggaacuucuccucaaugcaguuuggaggugcucugguacaaagcauuucugcuuccaagagaaauaacauugcuacaaaaaacuggcacauuauucugugaaaaaagacaugaguuuuuaguuguguucuacagcuaguucccgacccaaugcuucacauauccacacgaaaguaaaaggcagguaagacaaaaagggcuguaguuuuuucugaaauaacucaagucuucaaaauauagcuuuuauauucuuuguaaagugggauuagcauauugcaacugaaggguguucuaacaaacaaaaauuccagucuggauaauaauucuaugguagacaaaagaauucucagccucuuggguuuccuggaauucuuugcuucaugcucuccucuuccacuaugcagcuaagguaguuuaggaauuaagaugucaccccuuggccaucccccuuuagaacguaucuuaaugugaacauaaauuguucuucaugaugcuuaaaagcuuacauauaauuuucauucuuagaaaaacgccacauuuuggauccuggauuuuucugaauaucaugauugaaaaaaacaaaacaaaaaaugaacccaaaucaaagugugguuaaacuuauaugagaaagauuuuucaaccagauggucauucaaaaaaguuggagcuguaagugcuggcgacugaggacacaggguuaauuccucgcugcugguggaaggcuagagaacaucuucaaaagaggguagcaagacgugcuccuaggggaggcucaguguggucucgucugcccaagcauuuucagucuugcuuggucaaugacaucgaguaaguuuuuggcauccacagccagggcgugagcagcagucagcauuugcuuuuuguacucuugcuggaggcuggucaugacauacugcugggccaguuucaucuuguugaugagcucacccaggucagaguucaauagcuucugugccaucucaaucucucggugggugcuggcugguaggaggggaauggucucauccacaguggccaauaauguccucagggccaagccgacuuccuucaccauagggacauacuccucugguggggcuggcuggauuuuacuggacaucucgaugacagcuuucaccaggcccgucacauucucguacaccuuaucauucgaccgguccagguuggcaguaggaggggggcugauuuccuggggcugaagcuugacacccucguuguagcugucagcagggcugcugaggcuggcaaggcuucccagaugaccgggagcuccagggcgaggcgguuucuuugguggagcugcaggaucugguuuacccacaggcugauauauauguugguuuccaaucggacccugaagacuuccauccucccugucaauacugccucgagagagucucacaucagguuucagaaaucuuuccucuuuuuccagccagcgcugaucuucuuccauuuccuguugcugucggauuagacgcucuuccaucagauggguuggcaacacuugcccaaucccucgcagguccaauacuguagaguccuccacauugggcugccacauugcuaucuccugaggucuaugauuccaugaaucuguuugguccaaaagagaugccugaccuggauagaugcugccagccauggcugugauuccaugugaaccaggguagccagaaaccugguaaugauugguuuguaccaugugcugugggcugggauaaaauccuucgcuggaccucggacugggauaacccggucugcugggcuugggcggugcuucaucagacccuccggagucccaggacacuguggccugucuucuggacuccauccucaugcgcucuucuugcugagccuucucuuccuccaggauugugcggggccggcucccgaguacaugguggcgccgccgaggggcuccggggccgaggggcggccgc

SEQ ID NO: 2510-2520 - skipped (11 entries)

SEQ ID NO: 2521 - RNA, 1436 nt, Homo sapiens
gauggugcagacccuugcuuuauuugucugacuuguucacaguucagcccccugcucagaaaaccaacgggccagcuaaggagaggaggaggcaccuugagacuuccggagucgaggcucuccaggguuccccagcccaucaaucauuuucugcacccccugccugggaggcagcucccuggggggugggaaugggugacuagaggggauuucagugugggacccagggucuguucuucacaguaggagguggaagggaugacuaaguucuuuaucacagaccuacaaaaaaugagauaauuagauauuacucucacuaguuugggcuucuuuuuucuuuuucuuuuuacaaaacagcagcuggaaagagaaauguagguggcagacgagccaggcacgagguuucagauuggaagggaccaagaugaggaccaagguguggcugccugacuaggaacgcugugggcuggcccaggcucucgccacacauccugggagaacugccauaggcccuagaaggagggaugaaaggcguaugggagggaagacagcgguccccggaucagcagcagcaccaccauccucugauggccccugggcaguccgccagcucggaagcacucagggcuggagccugggcucuaagcaugggccccaggagccagacaggagggaggcagcaggaagggcuggcauggaagggcugaguucuauuggggucccacgcgggcaagggaaccaggacucaucccugcuugucagccaaucagcuucuucaggaaggccuccaacugauccucauccuugaugcccacaaacuuguccaccacguccccauucuucauggccagcacagugggcaccgcugacacguagaugagcccugaguaguaacgcuccuugagguugugcagcaccgaggcuucguugaggcacgugagcucugccauguccuccaccuuggagaacuugggcggguucaucuucuggaugucauccuuguucaccuucaccuucuucccauucuccaccagcuccacgauggccucuucgcccaccuccuccuugaggcuggcuggcucaaagccacucuugucggaaggcacccauaccagcuucuuggcagcccagucggccugggccagcggauuguugaugaaguuuuuauccacauagagauacuuaucggcagcuugcugugccauggugacuuauagccaggaccugaaccuggaucugccccgggaacaggcgcugcuucucccgagaggacuuucucgagcgcucgggcggcggccggguggggcgagcgcacgaggcgggagcugcagcaggucagccuugcuuagccuuccgugcccugcccaggaaccgcggugaucugcgcgccucaccgcacccagcucggcuccucgccgccuucccgccccgcccuc

SEQ ID NO: 2522 - RNA, 1980 nt, Homo sapiens
gauggugcagacccuugcuuuauuugucugacuuguucacaguucagcccccugcucagaaaaccaacgggccagcuaaggagaggaggaggcaccuugagacuuccggagucgaggcucuccaggguuccccagcccaucaaucauuuucugcacccccugccugggaggcagcucccuggggggugggaaugggugacuagaggggauuucagugugggacccagggucuguucuucacaguaggagguggaagggaugacuaaguucuuuaucacagaccuacaaaaaaugagauaauuagauauuacucucacuaguuugggcuucuuuuuucuuuuucuuuuuacaaaacagcagcuggaaagagaaauguagguggcagacgagccaggcacgagguuucagauuggaagggaccaagaugaggaccaagguguggcugccugacuaggaacgcugugggcuggcccaggcucucgccacacauccugggagaacugccauaggcccuagaaggagggaugaaaggcguaugggagggaagacagcgguccccggaucagcagcagcaccaccauccucugauggccccugggcaguccgccagcucggaagcacucagggcuggagccugggcucuaagcaugggccccaggagccagacaggagggaggcagcaggaagggcuggcauggaagggcugaguucuauuggggucccacgcgggcaagggaaccaggacucaucccugcuugucagccaaucagcuucuucaggaaggccuccaacugauccucauccuugaugcccacaaacuuguccaccacguccccauucuucauggccagcacagugggcaccgcugacaccucauacucaauggcgaggucuguguggucaucaauauccaccuuggccaucaccaccuucccgugcugcuuggccaccaucuucucuaaccucggccccaggaucuugcaggguccacaccacugugcguggaaauccacaaccacuggugucucacuguugaccacucggucuugaaagucagguccauccuggauauuaaagguugucaaggagauccucgugguguauauuguccgggcuggguuggguguuacagucaggccaccaggacugcauuguggggucugcagggcucuggaagugagggguggccacugacccugagagggcuuccuggagaugacagaggccaggaaccuccucagaagaagucgcugagccaucuugcaucauacuccuguaggcggugucugugauggcauagaugugagggggcaucucgugccucuucuugcccuuguacauuuccacaaucucuucagaguagaugggcagguucuuguaaggauugaugaccacacagaacaggccugaauagguguagaugagcccugaguaguaacgcuccuugagguugugcagcaccgaggcuucguugaggcacgugagcucugccauguccuccaccuuggagaacuugggcggguucaucuucuggaugucauccuuguucaccuucaccuucuucccauucuccaccagcuccacgauggccucuucgcccaccuccuccuugaggcuggcuggcucaaagccacucuugucggaaggcacccauaccagcuucuuggcagcccagucggccugggccagcggauuguugaugaaguuuuuauccacauagagauacuuaucggcagcuugcugugccauggugacuuauagccaggaccugaaccuggaucugccccgggaacaggcgcugcuucucccgagaggacuuucucgagcgcucgggcggcggccggguggggcgagcgcacgaggcgggagcugcagcaggucagccuugcuuagccuuccgugcccugcccaggaaccgcggugaucugcgcgccucaccgcacccagcucggcuccucgccgccuucccgccccgcccuc

SEQ ID NO: 2523-2524 - skipped (2 entries)

SEQ ID NO: 2525 - RNA, 1104 nt, Homo sapiens
uggguguucagcaguuuauuuacaaagugggcacaggggcgucaggggcugguggacccaggccgcuucuucuuucuccgucucguuuggagagcuccuuggggcugcuccaaacccgagagcuuccgcuuggcagcugccuccaaggaugcccaaaguucaucugucucugugucuucuaggggcaccuuguuggguucuugaggcucuuggggcucauccuuaugcuccagaccccguggauucuggauccuguguauccucaagacucuguccaagccacaggaggcuaguagaggcuuugaaggguggcacugcaacccacgcacacugccugccagccccuucagacagcccaguagacgcccuugccgaaggucaauuucugccagcugcccaugaguguuucccacaaucacugaguugccucccggagugagggucauggcuguuaguggguacucuccauagguggucucuaggacuggccggcgcuggggggaugcuggaucauaaacacggaccuguuugaugauauauguuagcucuucaauuuccacugcuuuaucaucaaagagggacuugcgcuuugccaagauugucagcuucuccagcuuggcaaauguguugcuaaggucuuucccaaugcgcuuggccaugagggugaauucacugcguugucggacagcacgcaaagcuggcuuauuugucuggauuccauucugacgggucugcagcgacuugcaggcagacagaaacuccuggguccgaucccggcaggacauggugucgggagggggagggacgagggucacuggggggggcagaggggcgaugucgcugcugcuacugccagcaguugcaggggacaggaccugugucuuugagagacccagguagacacccugauccguguucuuagacccguagcguuuccgcgggaucauugagacgcauaaccucggacuccccucugccgccugccgccgccgccacuuccaaucucaccggccgucacugccuccuccccgagcacugaagccgccgaaacccgaccaaagacuggaagcggccacgucaccuacacguaaccccacccccagu

SEQ ID NO: 2526 - RNA, 1823 nt, Homo sapiens
uggguguucagcaguuuauuuacaaagugggcacaggggcgucaggggcugguggacccaggccgcuucuucuuucuccgucucguuuggagagcuccuuggggcugcuccaaacccgagagcuuccgcuuggcagcugccuccaaggaugcccaaaguucaucugucucugugucuucuaggggcaccuuguuggguucuugaggcucuuggggcucauccuuaugcuccagaccccguggauucuggauccuguguauccucaagacucuguccaagccacaggaggcuaguagaggcuuugaaggguggcacugcaacccacgcacacugccugccagccccuucagacagcccaguagacgcccuugccgaaggucaauuucugccagcugcccaugaguguuucccacaaucacugaguugccucccggagugagggucauggcuguuaguggguacucuccauagguggucucuaggacuggccggcgcuggggggaugcuggaucauaaacacggaccuggugguacccugugcaggugacaagcuucugugauccugggagaaacuguauguccuggucccagaugggaacccgcaaguccagccagucauuccgcacguucuuggcccugaacacagguuccucagagcccugcaggucccauaucuucaaagcauucucuuucccaccuguggcaaccacaugggggugugcugggucuuggcgcauccuacacaccccagggcccacucucaguuccaggagugggucagaggauguguccuuguccuugucaugccagacucugagaaucccagaauccacacaugugaugagggugccgucggccugggcgaggccacggaacaugcccuccccgcccgggcagugucucugacccuggaauaugccauccucggugcugaagugcuucaccguccuguccgcgcagcccaccagcaucugggucucgccgccggugccccaacacagggcgcucacugccuccucgcgccgcggcuguccuccggccgugaaguucgccgccuguuuucgcugaagauuuaccccuuucaagaucccagucucggugccgacccacacaugguuccagcgugcagcagcagccgccaugacaaagccuggaggcagacaguucacacuuccggcgcagcgugugcgucaccagcgggcgucgaguccgaugcagcgcaguguaguugccaggugguuaggggcaaggggcagggcugacacaggugcccgggagaacugcucucuccggcuccucugcugcuucagguucucuguccucacuucuaaaaccgauuugaagucauuggacauagaagccaguuucgacugcaaggagaccacaaugguguuggagugggucugcaggugccggccacucuggcugcccuuggcucucacgaaauccuggagcugagcaauuuguuuguugaggcuauugauguccuguuugaugauauauguuagcucuucaauuuccacugcuuuaucaucaaagagggacuugcgcuuugccaagauugucagcuucuccagcuuggcaaauguguugcuaaggucuuucccaaugcgcuuggccaugagggugaauucacugcguugucggacagcacgcaaagcuggcuuauuugucuggauuccauucuccccucugccgccugccgccgccgccacuuccaaucucaccggccgucacugccuccuccccgagcacugaagccgccgaaacccgaccaaagacuggaagcggccacgucaccuacacguaaccccacccccagu

SEQ ID NO: 2527 - RNA, 917 nt, Homo sapiens
uggguguucagcaguuuauuuacaaagugggcacaggggcgucaggggcugguggacccaggccgcuucuucuuucuccgucucguuuggagagcuccuuggggcugcuccaaacccgagagcuuccgcuuggcagcugccuccaaggaugcccaaaguucaucugucucugugucuucuaggggcaccuuguuggguucuugaggcucuuggggcucauccucccaguugucccugccugacaagaggaggcaguucaauugagacuugagauaaaccuuaugcuccagaccccguggauucuggauccuguguauccucaagacucuguccaagccacaggaggcuaguagaggcuuugaaggguggcacugcaacccacgcacacugccugccagccccuucagacagcccaguagacgcccuugccgaaggucaauuucugccagcugcccaugaguguuucccacaaucacugaguugccucccggagugagggucauggcuguuaguggguacucuccauagguggucucuaggacuggccggcgcuggggggaugcuggaucauaaacacggaccuguuugaugauauauguuagcucuucaauuuccacugcuuuaucaucaaagagggacuugcgcuuugccaagauugucagcuucuccagcuuggcaaauguguugcuaaggucuuucccaaugcgcuuggccaugagggugaauucacugcguugucggacagcacgcaaagcuggcuuauuugucuggauuccauucuccccucugccgccugccgccgccgccacuuccaaucucaccggccgucacugccuccuccccgagcacugaagccgccgaaacccgaccaaagacuggaagcggccacgucaccuacacguaaccccacccccagu

SEQ ID NO: 2528 - RNA, 860 nt, Homo sapiens
uggguguucagcaguuuauuuacaaagugggcacaggggcgucaggggcugguggacccaggccgcuucuucuuucuccgucucguuuggagagcuccuuggggcugcuccaaacccgagagcuuccgcuuggcagcugccuccaaggaugcccaaaguucaucugucucugugucuucuaggggcaccuuguuggguucuugaggcucuuggggcucauccuuaugcuccagaccccguggauucuggauccuguguauccucaagacucuguccaagccacaggaggcuaguagaggcuuugaaggguggcacugcaacccacgcacacugccugccagccccuucagacagcccaguagacgcccuugccgaaggucaauuucugccagcugcccaugaguguuucccacaaucacugaguugccucccggagugagggucauggcuguuaguggguacucuccauagguggucucuaggacuggccggcgcuggggggaugcuggaucauaaacacggaccuguuugaugauauauguuagcucuucaauuuccacugcuuuaucaucaaagagggacuugcgcuuugccaagauugucagcuucuccagcuuggcaaauguguugcuaaggucuuucccaaugcgcuuggccaugagggugaauucacugcguugucggacagcacgcaaagcuggcuuauuugucuggauuccauucuccccucugccgccugccgccgccgccacuuccaaucucaccggccgucacugccuccuccccgagcacugaagccgccgaaacccgaccaaagacuggaagcggccacgucaccuacacguaaccccacccccagu

SEQ ID NO: 2529 - RNA, 1181 nt, Homo sapiens
uagaauacaguagaggaaggucaugggcucagggacaggguuggaacagacggggaagcgcuugcuccucugaacucagaauggugagaagagcaguugugucaaaccgugggggccauuucuccaggaggcugcuuuaucccaggagaaggcaggugugaggugacaccuuaccuggugguacccugugcaggugacaagcuucugugauccugggagaaacuguauguccuggucccagaugggaacccgcaaguccagccagucauuccgcaccugguggggugggcagauggaggacagggcuauggggggcucgaugugccccuguuuucagcccuccuucgcccccuaaguccaucuagucucuaaugcaucgucaguggccucagccucccucgacuucaggaacagcuccuucacacucuugucacucacguucuuggcccugaacacagguuccucagagcccugcaggucccauaucuucaaagcauucucuuucccaccuguggcaaccacaugggggugugcugggucuuggcgcauccuacacaccccagggcccacucucaguuccaggagugggucagaggauguguccuuguccuugucaugccagacucugagaaucccagaauccacacaugugaugagggugccgucggccugggcgaggccacggaacaugcccuccccgcccgggcagugucucugacccuggaauaugccauccucggugcugaagugcuucaccguccuguccgcgcagcccaccagcaucugggucucgccgccggugccccaacacagggcgcucacugccuccucgcgccgcggcuguccuccggccgugaaguucgccgccuguuuucgcugaagauuuaccccuuucaagaucccagucucggugccgacccacacaugguuccagcgugcagcagcagccgccaugacaaagccuggaggcagacaguucacacuuccggcgcagcgugugcgucaccagcgggcgucgaguccgaugcagcgcaguguaguugcuccccucugccgccugccgccgccgccacuuccaaucucaccggccgucacugccuccuccccgagcacugaagccgccgaaacccgaccaaagacuggaagcggccacgucaccuacacguaaccccacccccagu

SEQ ID NO: 2530 - RNA, 1161 nt, Homo sapiens
uggguguucagcaguuuauuuacaaagugggcacaggggcgucaggggcugguggacccaggccgcuucuucuuucuccgucucguuuggagagcuccuuggggcugcuccaaacccgagagcuuccgcuuggcagcugccuccaaggaugcccaaaguucaucugucucugugucuucuaggggcaccuuguuggguucuugaggcucuuggggcucauccucccaguugucccugccugacaagaggaggcaguucaauugagacuugagauaaaccuuaugcuccagaccccguggauucuggauccuguguauccucaagacucuguccaagccacaggaggcuaguagaggcuuugaaggguggcacugcaacccacgcacacugccugccagccccuucagacagcccaguagacgcccuugccgaaggucaauuucugccagcugcccaugaguguuucccacaaucacugaguugccucccggagugagggucauggcuguuaguggguacucuccauagguggucucuaggacuggccggcgcuggggggaugcuggaucauaaacacggaccuguuugaugauauauguuagcucuucaauuuccacugcuuuaucaucaaagagggacuugcgcuuugccaagauugucagcuucuccagcuuggcaaauguguugcuaaggucuuucccaaugcgcuuggccaugagggugaauucacugcguugucggacagcacgcaaagcuggcuuauuugucuggauuccauucugacgggucugcagcgacuugcaggcagacagaaacuccuggguccgaucccggcaggacauggugucgggagggggagggacgagggucacuggggggggcagaggggcgaugucgcugcugcuacugccagcaguugcaggggacaggaccugugucuuugagagacccagguagacacccugauccguguucuuagacccguagcguuuccgcgggaucauugagacgcauaaccucggacuccccucugccgccugccgccgccgccacuuccaaucucaccggccgucacugccuccuccccgagcacugaagccgccgaaacccgaccaaagacuggaagcggccacgucaccuacacguaaccccacccccagu

SEQ ID NO: 2531 - RNA, 2353 nt, Homo sapiens
uggguguucagcaguuuauuuacaaagugggcacaggggcgucaggggcugguggacccaggccgcuucuucuuucuccgucucguuuggagagcuccuuggggcugcuccaaacccgagagcuuccgcuuggcagcugccuccaaggaugcccaaaguucaucugucucugugucuucuaggggcaccuuguuggguucuugaggcucuuggggcucauccucccaguugucccugccugacaagaggaggcaguucaauugagacuugagauaaaccuuaugcuccagaccccguggauucuggauccuguguauccucaagacucuguccaagccacaggaggcuaguagaggcuuugaaggguggcacugcaacccacgcacacugccugccagccccuucagacagcccaguagacgcccuugccgaaggucaauuucugccagcugcccaugaguguuucccacaaucacugaguugccucccggagugagggucauggcuguuaguggguacucuccauagguggucucuaggacuggccggcgcuggggggaugcuggaucauaaacacggaccuggugguacccugugcaggugacaagcuucugugauccugggagaaacuguauguccuggucccagaugggaacccgcaaguccagccagucauuccgcacguucuuggcccugaacacagguuccucagagcccugcaggucccauaucuucaaagcauucucuuucccaccuguggcaaccacaugggggugugcugggucuuggcgcauccuacacaccccagggcccacucucaguuccaggagugggucagaggauguguccuuguccuugucaugccagacucugagaaucccagaauccacacaugugaugagggugccgucggccugggcgaggccacggaacaugcccuccccgcccgggcagugucucugacccuggaauaugccauccucggugcugaagugcuucaccguccuguccgcgcagcccaccagcaucugggucucgccgccggugccccaacacagggcgcucacugccuccucgcgccgcggcuguccuccggccgugaaguucgccgccuguuuucgcugaagauuuaccccuuucaagaucccagucucggugccgacccacacaugguuccagcgugcagcagcagccgccaugacaaagccuggaggcagacaguucacacuuccggcgcagcgugugcgucaccagcgggcgucgaguccgaugcagcgcaguguaguugcucugaaugguuuccuccuguuccuuaaccaugugugccaacugcugaaagauggagcccaacucaacaauugucgacucaauguucugcauggugucugcccgacucuggauguaggaauccugcucgucaaugagcugcagcugcuggcugguccgagaguccaucaugucgauggcgacauccuuggaggcaugggacucugcccccagaaccacagcaccaccgcccaggugguuaggggcaaggggcagggcugacacaggugcccgggagaacugcucucuccggcuccucugcugcuucagguucucuguccucacuucuaaaaccgauuugaagucauuggacauagaagccaguuucgacugcaaggagaccacaaugguguuggagugggucugcaggugccggccacucuggcugcccuuggcucucacgaaauccuggagcugagcaauuuguuuguugaggcuauugauguccuguuugaugauauauguuagcucuucaauuuccacugcuuuaucaucaaagagggacuugcgcuuugccaagauugucagcuucuccagcuuggcaaauguguugcuaaggucuuucccaaugcgcuuggccaugagggugaauucacugcguugucggacagcacgcaaagcuggcuuauuugucuggauuccauucugacgggucugcagcgacuugcaggcagacagaaacuccuggguccgaucccggcaggacauggugucgggagggggagggacgagggucacuggggggggcagaggggcgaugucgcugcugcuacugccagcaguugcaggggacaggaccugugucuuugagagacccagguagacacccugauccguguucuuagacccguagcguuuccgcgggaucauugagacgcauaaccucggacuccccucugccgccugccgccgccgccacuuccaaucucaccggccgucacugccuccuccccgagcacugaagccgccgaaacccgaccaaagacuggaagcggccacgucaccuacacguaaccccacccccagu

SEQ ID NO: 2532 - RNA, 731 nt, Homo sapiens
ugcugaaagugguuacuuuauugguugggaaagggagaagcuguggucagcccaagagggaauacagagucccgaaaaaggggagggcaggugggcuggaaccagaugcagggccaggcagaaacuuucucuccucacugcucagccuggugguggcuggagcucagaaauugggagugacacaggacaccuucccacagccauugcggcagcauuucaucuggccaggacacuggcuguccaccuggcacuggucccgacagaggccgagcuggggaaaguuaauguucaccugggggcaggaacccuccuuaucuuucacaggggaaacgcaggauuucccacacaugcccaugcaacacuucaagucacgcuugcacuggccauccaucucacagaaauuggggggguuaagcaucaaacauuggccauaagucacugggcacuucccaggcuuccuccuuguuggguuuggggugucaacaggauccaggcauuugaugccacaagugucaggacaacaucucuucuucccuggacacugccagucacucuggcacucagguuucuuguaucuaaggcacugggcagauuucuuaggaggacagacuccagcuuugaaggacuuuccagagccuuccacagcccaaggugccagaguucccagggcaagcagcaccaggaaggggaagaggccgcuggacuucauggugaaggcaggagugacucug

SEQ ID NO: 2533 - RNA, 581 nt, Homo sapiens
ugcugaaagugguuacuuuauugguugggaaagggagaagcuguggucagcccaagagggaauacagagucccgaaaaaggggagggcaggugggcuggaaccagaugcagggccaggcagaaacuuucucuccucacugcucagccuggugguggcuggagcucagaaauugggagugacacaggacaccuucccacagccauugcggcagcauuucaucuggccaggacacuggcuguccaccuggcacuggucccgacagaggccgagcuggggaaaguuaauguucaccugggggcaggaacccuccuuauuuggguuuggggugucaacaggauccaggcauuugaugccacaagugucaggacaacaucucuucuucccuggacacugccagucacucuggcacucagguuucuuguaucuaaggcacugggcagauuucuuaggaggacagacuccagcuuugaaggacuuuccagagccuuccacagcccaaggugccagaguucccagggcaagcagcaccaggaaggggaagaggccgcuggacuucauggugaaggcaggagugacucug

SEQ ID NO: 2534 - RNA, 3232 nt, Homo sapiens
gacuuugaaaguucaguucaguuuauuacagugucaaguagauuuacaacuauugcacuuaucauucugcugacagaaggccaaaacugaagauugagauuuuccucuaauaaagauagguuuucagaaucuucaauauaagauguuaaaauuauaaaggcaaagauauauaccucauguuccauuccauauccuuccugcuguuguacaguuugcugcaaaugauaauuuaauuuggauaaugcuuuaaaucauugauuucucaugaaauuacuuuugagugaaauuugacaagaauuuucuuuauacucucuucuuuaccaaaacguauuagaaguccccauaguccaaaauaaaauguaaccauagaauggggagauaacuuuagucaaagaccaaguaaauauuaccuucuuugcagaacuccagguuguagucacguaaaaguguggccacuuguugcuuaacuuuuuggacaaugggaaaaaaaaaacaauaaaagcuaaaaugugguccagcauaugaaacucuucucaaaaacagaagaaagucaugaccauuguugggaaaguguuuuacauuuccaaugaaauucuauuccauugaucuguuuggaugauugucuucaaccuauuuggcucuagcccauaaauuguaauugauucagucauguaaagaaccacuuuuaucuuaagcuuagaauuuauaacaauggaaagcaggaaagugguuuuucauucacucuaauaauugugcagggauaagcuagagaaaaaauaaaacaaaaaaguaccagucuucuguccucuuaaauuauuuuucauucugauuauauuacaaagaaaugagcuguggagguuuggcacuguuuuccaucuuaacaguuguucuguauuguaagauuuuauaugugauucauaauguacuacuauaacaagacacaguuuuuauauauuacuggaauaaugcaaagaaaaugaauuuuccuuuggguccaguaauugucaaaggaaugauugcagauucagaaaaugugcuuuguaauaacccuguuaacauaaaguauacacugaggaaaaaaauaaguauggcacauauauggaaggauuaguuguauuagcaaggcauuucagggaugguuuugguucuuuagacuaaguaagauacauccaauuuagacccccuucaaauccuuagacaaaugggaaucacuugguaacauaaagauuauuuuggugggcaggggcugauuucaccaugugcuuacaaaugcuccaacuagucaguaaacuaucccaucugaaggaaggauuugcucugguaauaaggcugauaugcucaagcuguaagaauuaauuugaauaucaaaaaugaaauugagauugcuaaccauguccugauaguuacagcauguagaauauuaaauguccucuuuuuuaacuaaaguaaaaaaaugaagaagcaugguuaauucacuugugcugauuaaaacagauguccacgugcaacuucugugugugagccuccccaugcugccaugccaccagaugcuuucccuucaccuugcuaaucccacuagauguuuuccucgguagaauccuagcucauggguuuccaugugcauguuucuauuguaaugaaaauuaacuacaaaaucugaacguuuucugcuuucagaaaauucuaguguaccauguacagcuuagauauuucuuuuucaguuaaaaaaaauagugcaaaaacauaucugauagucaaggugauaguucaagugaguucuugugccaaggaacacagacaagcuucuccucuagcugaucuguagaaacuguauguaguuuuugggaaauauuccagauuuucccauaaguucuccacucauccagucaucaucuacagauuccagcucuguuauuauaucuccagccuugaaggaaaguucaucuucauucuccccucggaaaucauauaaggcuuuggccuuccuccccuucgguacuauggccaacauacuuuuugccucagcugggcagggccucacaaacacugcugggaagauccccucccuguccugcagucugccccugcaccagucagaauccagacguuccagaaucuggauccggucuccccucuugaaugauaagucaucacuggucucugcuguaaaacugugaagagcuucacaccauucugccggaagacuguuaaccugagaguuugagccagaaucuucuuuuuugguuuucagugguaccuuugugcuuaaaacauuugcaccagaggugggauaauccucaacaggcuccacaaaguucagggggaaaaucccaguucugccucgaacuucuccucuggcccauuccucauucacauacucuuuaagaauaauaauuucucccucugagaaacucaacucauccuucugcucuccaauauauucaaaccgagcaacacaucuugagccuuuaacacaaugagaugaaacacauucucuuuucccauuuccuccuucugggauaucaauaaucacuuugacauaguuggcaggaaauaugccaaucugguuucuacaguucccucuguaccaaucuguaucuaucuucuccagaagauaaacaauuucuccagaagugagguucaaaucaucaacuugcucugcugggaaaucaugaagaacgacagcaugaggagcaccacugucaacaggcuucugagcguggcuuggauccagguuaaagacaguuucuacaauaucccuauuggauacuucuccaacuucaaccaaaccggucaacacggcaaauuucauucugaugccccugauggggagcccugguuucagagacaaugcacccccuucaguagggguuucuucucucccuccaccucccccgucaucaccuguugguggcggggaagggacacgauugucuucgcuagccauugcuagcucacgauaaaggacaacucagagucacccugggacggcagucgcugcacugguaaugagcacaacacacgcaaugcaaaacgaaagggucccucuuccaacuuguggagauaccccaaagcaguugauguggaaaguccuuggcgucgcccuccuccucuuggagaauauuuguccaaucucucuccccgaggcugacaacaacgccaaaccccagauacuccggacucguccucaccccccgcccaggagcagcgagaccgagguggcggcggagau

SEQ ID NO: 2535 - RNA, 3769 nt, Homo sapiens
gacuuugaaaguucaguucaguuuauuacagugucaaguagauuuacaacuauugcacuuaucauucugcugacagaaggccaaaacugaagauugagauuuuccucuaauaaagauagguuuucagaaucuucaauauaagauguuaaaauuauaaaggcaaagauauauaccucauguuccauuccauauccuuccugcuguuguacaguuugcugcaaaugauaauuuaauuuggauaaugcuuuaaaucauugauuucucaugaaauuacuuuugagugaaauuugacaagaauuuucuuuauacucucuucuuuaccaaaacguauuagaaguccccauaguccaaaauaaaauguaaccauagaauggggagauaacuuuagucaaagaccaaguaaauauuaccuucuuugcagaacuccagguuguagucacguaaaaguguggccacuuguugcuuaacuuuuuggacaaugggaaaaaaaaaacaauaaaagcuaaaaugugguccagcauaugaaacucuucucaaaaacagaagaaagucaugaccauuguugggaaaguguuuuacauuuccaaugaaauucuauuccauugaucuguuuggaugauugucuucaaccuauuuggcucuagcccauaaauuguaauugauucagucauguaaagaaccacuuuuaucuuaagcuuagaauuuauaacaauggaaagcaggaaagugguuuuucauucacucuaauaauugugcagggauaagcuagagaaaaaauaaaacaaaaaaguaccagucuucuguccucuuaaauuauuuuucauucugauuauauuacaaagaaaugagcuguggagguuuggcacuguuuuccaucuuaacaguuguucuguauuguaagauuuuauaugugauucauaauguacuacuauaacaagacacaguuuuuauauauuacuggaauaaugcaaagaaaaugaauuuuccuuuggguccaguaauugucaaaggaaugauugcagauucagaaaaugugcuuuguaauaacccuguuaacauaaaguauacacugaggaaaaaaauaaguauggcacauauauggaaggauuaguuguauuagcaaggcauuucagggaugguuuugguucuuuagacuaaguaagauacauccaauuuagacccccuucaaauccuuagacaaaugggaaucacuugguaacauaaagauuauuuuggugggcaggggcugauuucaccaugugcuuacaaaugcuccaacuagucaguaaacuaucccaucugaaggaaggauuugcucugguaauaaggcugauaugcucaagcuguaagaauuaauuugaauaucaaaaaugaaauugagauugcuaaccauguccugauaguuacagcauguagaauauuaaauguccucuuuuuuaacuaaaguaaaaaaaugaagaagcaugguuaauucacuugugcugauuaaaacagauguccacgugcaacuucugugugugagccuccccaugcugccaugccaccagaugcuuucccuucaccuugcuaaucccacuagauguuuuccucgguagaauccuagcucauggguuuccaugugcauguuucuauuguaaugaaaauuaacuacaaaaucugaacguuuucugcuuucagaaaauucuaguguaccauguacagcuuagauauuucuuuuucaguuaaaaaaaauagugcaaaaacauaucugauagucaaggugauaguucaagugaguucuugugccaaggaacacagacaagcuucuccucuagcugaucuguagaaacuguauguaguuuuugggaaauauuccagauuuucccauaaguucuccacucauccagucaucaucuacagauuccagcucuguuauuauaucuccagccuugaaggaaaguucaucuucauucuccccucggaaaucauauaaggcuuuggccuuccuccccuucgguacuauggccaacauacuuuuugccucagcugggcagggccucacaaacacugcugggaagauccccucccuguccugcagucugccccugcaccagucagaauccagacguuccagaaucuggauccggucuccccucuugaaugauaagucaucacuggucucugcuguaaaacugugaagagcuucacaccauucugccggaagacuguuaaccugagaguuugagccagaaucuucuuuuuugguuuucagugguaccuuugugcuuaaaacauuugcaccagaggugggauaauccucaacaggcuccacaaaguucagggggaaaaucccaguucugccucgaacuucuccucuggcccauuccucauucacauacucuuuaagaauaauaauuucucccucugagaaacucaacucauccuucugcucuccaauauauucaaaccgagcaacacaucuugagccuuuaacacaaugagaugaaacacauucucuuuucccauuuccuccuucugggauaucaauaaucacuuugacauaguuggcaggaaauaugccaaucugguuucuacaguucccucuguaccaaucuguaucuaucuucuccagaagauaaacaauuucuccagaagugagguucaaaucaucaacuugcucugcugggaaaucaugaagaacgacagcaugaggagcaccacugucaacaggcuucugagcguggcuuggaucguuuggucugcuucuaagauguucaucaaguggagugauaaucuucauuugagacaggugaacucugccagugucuucucccuuuuggcacuccaaguaauuauuuuccgucugcuucagcaucacaaguacauccccacgcuuacaagagaguucuccgggguuuugagagacaauaucuucauuggcaauuccaugaggcacagacagcauguauuuacuguagagaggguguccugguuugggacgaggggguagcaccggaucuugauuuuuaaaaacuugacucuuggcuuuugagaguccaguugccaaguuacuuuguuuuuucugaagauccaugucagaagaggaucgauuaaaaggcaguuucuuauuagaucuucugguugcagaaagcuuugggggagguggucucucagggggcaccuugguuggaggcuguugaguuggaaugguuuuuccauucacaggucucgguggcaaccuuggggguacucgcacaaaaccuccuguuugaccugggugguuggauuccagguuaaagacaguuucuacaauaucccuauuggauacuucuccaacuucaaccaaaccggucaacacggcaaauuucauucugaugccccugauggggagcccugguuucagagacaaugcacccccuucaguagggguuucuucucucccuccaccucccccgucaucaccuguugguggcggggaagggacacgauugucuucgcuagccauugcuagcucacgauaaaggacaacucagagucacccugggacggcagucgcugcacugguaaugagcacaacacacgcaaugcaaaacgaaagggucccucuuccaacuuguggagauaccccaaagcaguugauguggaaaguccuuggcgucgcccuccuccucuuggagaauauuuguccaaucucucuccccgaggcugacaacaacgccaaaccccagauacuccggacucguccucaccccccgcccaggagcagcgagaccgagguggcggcggagau

SEQ ID NO: 2536 - RNA, 3659 nt, Homo sapiens
gacuuugaaaguucaguucaguuuauuacagugucaaguagauuuacaacuauugcacuuaucauucugcugacagaaggccaaaacugaagauugagauuuuccucuaauaaagauagguuuucagaaucuucaauauaagauguuaaaauuauaaaggcaaagauauauaccucauguuccauuccauauccuuccugcuguuguacaguuugcugcaaaugauaauuuaauuuggauaaugcuuuaaaucauugauuucucaugaaauuacuuuugagugaaauuugacaagaauuuucuuuauacucucuucuuuaccaaaacguauuagaaguccccauaguccaaaauaaaauguaaccauagaauggggagauaacuuuagucaaagaccaaguaaauauuaccuucuuugcagaacuccagguuguagucacguaaaaguguggccacuuguugcuuaacuuuuuggacaaugggaaaaaaaaaacaauaaaagcuaaaaugugguccagcauaugaaacucuucucaaaaacagaagaaagucaugaccauuguugggaaaguguuuuacauuuccaaugaaauucuauuccauugaucuguuuggaugauugucuucaaccuauuuggcucuagcccauaaauuguaauugauucagucauguaaagaaccacuuuuaucuuaagcuuagaauuuauaacaauggaaagcaggaaagugguuuuucauucacucuaauaauugugcagggauaagcuagagaaaaaauaaaacaaaaaaguaccagucuucuguccucuuaaauuauuuuucauucugauuauauuacaaagaaaugagcuguggagguuuggcacuguuuuccaucuuaacaguuguucuguauuguaagauuuuauaugugauucauaauguacuacuauaacaagacacaguuuuuauauauuacuggaauaaugcaaagaaaaugaauuuuccuuuggguccaguaauugucaaaggaaugauugcagauucagaaaaugugcuuuguaauaacccuguuaacauaaaguauacacugaggaaaaaaauaaguauggcacauauauggaaggauuaguuguauuagcaaggcauuucagggaugguuuugguucuuuagacuaaguaagauacauccaauuuagacccccuucaaauccuuagacaaaugggaaucacuugguaacauaaagauuauuuuggugggcaggggcugauuucaccaugugcuuacaaaugcuccaacuagucaguaaacuaucccaucugaaggaaggauuugcucugguaauaaggcugauaugcucaagcuguaagaauuaauuugaauaucaaaaaugaaauugagauugcuaaccauguccugauaguuacagcauguagaauauuaaauguccucuuuuuuaacuaaaguaaaaaaaugaagaagcaugguuaauucacuugugcugauuaaaacagauguccacgugcaacuucugugugugagccuccccaugcugccaugccaccagaugcuuucccuucaccuugcuaaucccacuagauguuuuccucgguagaauccuagcucauggguuuccaugugcauguuucuauuguaaugaaaauuaacuacaaaaucugaacguuuucugcuuucagaaaauucuaguguaccauguacagcuuagauauuucuuuuucaguuaaaaaaaauagugcaaaaacauaucugauagucaaggugauaguucaagugaguucuugugccaaggaacacagacaagcuucuccucuagcugaucuguagaaacuguauguaguuuuugggaaauauuccagauuuucccauaaguucuccacucauccagucaucaucuacagauuccagcucuguuauuauaucuccagccuugaaggaaaguucaucuucauucuccccucggaaaucauauaaggcuuuggccuuccuccccuucgguacuauggccaacauacuuuuugccucagcugggcagggccucacaaacacugcugggaagauccccucccuguccugcagucugccccugcaccagucagaauccagacguuccagaaucuggauccggucuccccucuugaaugauaagucaucacuggucucugcuguaaaacugugaagagcuucacaccauucugccggaagacuguuaaccugagaguuugagccagaaucuucuuuuuugguuuucagugguaccuuugugcuuaaaacauuugcaccagaggugggauaauccucaacaggcuccacaaaguucagggggaaaaucccaguucugccucgaacuucuccucuggcccauuccucauucacauacucuuuaagaauaauaauuucucccucugagaaacucaacucauccuucugcucuccaauauauucaaaccgagcaacacaucuugagccuuuaacacaaugagaugaaacacauucucuuuucccauuuccuccuucugggauaucaauaaucacuuugacauaguuggcaggaaauaugccaaucugguuucuacaguucccucuguaccaaucuguaucuaucuucuccagaagauaaacaauuucuccagaagugagguucaaaucaucaacuugcucugcugggaaaucaugaagaacgacagcaugaggagcaccacugucaacaggcuucugagcguggcuuggaucguuuggucugcuucuaagauguucaucaaguggagugauaaucuucauuugagacaggugaacucugccagugucuucucccuuuuggcacuccaaguaauuauuuuccgucugcuucagcaucacaaguacauccccacgcauguauuuacuguagagaggguguccugguuugggacgaggggguagcaccggaucuugauuuuuaaaaacuugacucuuggcuuuugagaguccaguugccaaguuacuuuguuuuuucugaagauccaugucagaagaggaucgauuaaaaggcaguuucuuauuagaucuucugguugcagaaagcuuugggggagguggucucucagggggcaccuugguuggaggcuguugaguuggaaugguuuuuccauucacaggucucgguggcaaccuuggggguacucgcacaaaaccuccuguuugaccugggugguuggauuccagguuaaagacaguuucuacaauaucccuauuggauacuucuccaacuucaaccaaaccggucaacacggcaaauuucauucugaugccccugauggggagcccugguuucagagacaaugcacccccuucaguagggguuucuucucucccuccaccucccccgucaucaccuguugguggcggggaagggacacgauugucuucgcuagccauugcuagcucacgauaaaggacaacucagagucacccugggacggcagucgcugcacugguaaugagcacaacacacgcaaugcaaaacgaaagggucccucuuccaacuuguggagauaccccaaagcaguugauguggaaaguccuuggcgucgcccuccuccucuuggagaauauuuguccaaucucucuccccgaggcugacaacaacgccaaacccuggucgcagccuccaaguuucccu

SEQ ID NO: 2537 - RNA, 3028 nt, Homo sapiens
gacuuugaaaguucaguucaguuuauuacagugucaaguagauuuacaacuauugcacuuaucauucugcugacagaaggccaaaacugaagauugagauuuuccucuaauaaagauagguuuucagaaucuucaauauaagauguuaaaauuauaaaggcaaagauauauaccucauguuccauuccauauccuuccugcuguuguacaguuugcugcaaaugauaauuuaauuuggauaaugcuuuaaaucauugauuucucaugaaauuacuuuugagugaaauuugacaagaauuuucuuuauacucucuucuuuaccaaaacguauuagaaguccccauaguccaaaauaaaauguaaccauagaauggggagauaacuuuagucaaagaccaaguaaauauuaccuucuuugcagaacuccagguuguagucacguaaaaguguggccacuuguugcuuaacuuuuuggacaaugggaaaaaaaaaacaauaaaagcuaaaaugugguccagcauaugaaacucuucucaaaaacagaagaaagucaugaccauuguugggaaaguguuuuacauuuccaaugaaauucuauuccauugaucuguuuggaugauugucuucaaccuauuuggcucuagcccauaaauuguaauugauucagucauguaaagaaccacuuuuaucuuaagcuuagaauuuauaacaauggaaagcaggaaagugguuuuucauucacucuaauaauugugcagggauaagcuagagaaaaaauaaaacaaaaaaguaccagucuucuguccucuuaaauuauuuuucauucugauuauauuacaaagaaaugagcuguggagguuuggcacuguuuuccaucuuaacaguuguucuguauuguaagauuuuauaugugauucauaauguacuacuauaacaagacacaguuuuuauauauuacuggaauaaugcaaagaaaaugaauuuuccuuuggguccaguaauugucaaaggaaugauugcagauucagaaaaugugcuuuguaauaacccuguuaacauaaaguauacacugaggaaaaaaauaaguauggcacauauauggaaggauuaguuguauuagcaaggcauuucagggaugguuuugguucuuuagacuaaguaagauacauccaauuuagacccccuucaaauccuuagacaaaugggaaucacuugguaacauaaagauuauuuuggugggcaggggcugauuucaccaugugcuuacaaaugcuccaacuagucaguaaacuaucccaucugaaggaaggauuugcucugguaauaaggcugauaugcucaagcuguaagaauuaauuugaauaucaaaaaugaaauugagauugcuaaccauguccugauaguuacagcauguagaauauuaaauguccucuuuuuuaacuaaaguaaaaaaaugaagaagcaugguuaauucacuugugcugauuaaaacagauguccacgugcaacuucugugugugagccuccccaugcugccaugccaccagaugcuuucccuucaccuugcuaaucccacuagauguuuuccucgguagaauccuagcucauggguuuccaugugcauguuucuauuguaaugaaaauuaacuacaaaaucugaacguuuucugcuuucagaaaauucuaguguaccauguacagcuuagauauuucuuuuucaguuaaaaaaaauagugcaaaaacauaucugauagucaaggugauaguucaagugaguucuugugccaaggaacacagacaagcuucuccucuagcugaucuguagaaacuguauguaguuuuugggaaauauuccagauuuucccauaaguucuccacucauccagucaucaucuacagauuccagcucuguuauuauaucuccagccuugaaggaaaguucaucuucauucuccccucggaaaucauauaaggcuuuggccuuccuccccuucgguacuauggccaacauacuuuuugccucagcugggcagggccucacaaacacugcugggaagauccccucccuguccugcagucugccccugcaccagucagaauccagacguuccagaaucuggauccggucuccccucuugaaugauaagucaucacuggucucugcuguaaaacugugaagagcuucacaccauucugccggaagacuguuaaccugagaguuugagccagaaucuucuuuuuugguuuucagugguaccuuugugcuuaaaacauuugcaccagaggugggauaauccucaacaggcuccacaaaguucagggggaaaaucccaguucugccucgaacuucuccucuggcccauuccucauucacauacucuuuaagaauaauaauuucucccucugagaaacucaacucauccuucugcucuccaauauauucaaaccgagcaacacaucuugagccuuuaacacaaugagaugaaacacauucucuuuucccauuuccuccuucugggauaucaaucagguuaaagacaguuucuacaauaucccuauuggauacuucuccaacuucaaccaaaccggucaacacggcaaauuucauucugaugccccugauggggagcccugguuucagagacaaugcacccccuucaguagggguuucuucucucccuccaccucccccgucaucaccuguugguggcggggaagggacacgauugucuucgcuagccauugcuagcucacgauaaaggacaacucagagucacccugggacggcagucgcugcacugguaaugagcacaacacacgcaaugcaaaacgaaagggucccucuuccaacuuguggagauaccccaaagcaguugauguggaaaguccuuggcgucgcccuccuccucuuggagaauauuuguccaaucucucuccccgaggcugacaacaacgccaaaccccagauacuccggacucguccucaccccccgcccaggagcagcgagaccgagguggcggcggagau

SEQ ID NO: 2538-2574 - skipped (37 entries)

SEQ ID NO: 2575 - RNA, 9384 nt, Homo sapiens
uggagggagcagagcgcacaaacauuuauuuacaaaagucccaguuacauaugauacaggcuuuuuacacacaguaguugaaacggaauuauuuuaucuauuuuuacuaccagaagguaaagaaaaaguuuaaugaacuaaucguuucuuguuuuuauacaaagugacagaucaugcacauuuuuuucaguuuuuaaauauuuugcuaagugcaaauacuagauuccucucuccaguuuuaaggcaaguaagagggggcuguggcuggggagccucacgcccugcggcaagcccugcagggcagagagagggagccagcugccucaggguugccuguugucugaccugcucucugggcacuggcacggccccuugcuggcuggucugaagacccccagugcuucucuccccaaugcugucacugguccaggcaggagcccgagguucaggcccugccucuggacagaggggccuggagaaccagggugggugcucacggcagcccuguggucccccgugccuggcucggggaggauccucaggaaucagggacccuccaaggaaagaggccgccgcuccuuccccaccagcccaguguggccagaacagcuggaacuccucucaaaugacccaccccugggguuuggccuuaggagaaacaucacucugggcucccccuccccugccaggguugaggccagcaccugucuagggcuguuucugcagcugcugccugcucccuuuguccugccuggggcucuugcuggagccacgugccuaggguacagggcagagggagcugaggcucccagggccugaggucaccucuucagcugugaugucuacagccgcccucugcucccagagauccucccuggggaagcacagggagcauauuuaagguaccgaagacaauccuguugcugccgcauggagccugccuuuccaaggcacugucguucaggcuaguagcaaaguucaggcaguccaacagguaugggcgccagcaaggacauagcagcaggcugcccccaagcccggccucccugcgcacccuuaccccagguccaggugaccaccugucuucaaagccuccauccugggcaaaggcagaaagaauggguaucuuaguuuuuuuuuuuuuuuuuuuaaagauagaguuuugcuuuuguugcucaggcuggagugcaguggcacaaucuuggcucacugcaaccucugccucccagguucaagugauucuccugccucagccuccugaguaccugggauuauaggcaugcgccaccuuguccggcuaauuuuguauuuuuaguagagacggggacucaaacucccgaccucaacucauccgcccgccucggccucccaaagugcugggauuacaggcgggagccaccgcgccgggccaucuuagaucuuagagcccacuuuaguccuugaaauacaucugagaagccaauggcagcgaaugacggugcccgccugccccaggcaccuugggugggccaggcccugcuucaggagguggcgggccacuccggagacugaugcagccccaccccaaugguugucggacucagcugugucugaggucugugaacucccagccucucagaaccccauggcaacacgacaaggacaaggcagggcaugaggaggaggagaaagugaugccuguggccaggaaggcuucagaccucucaucugucaaugggccagagugaugccucaggcaccgcuagaaacccagggccggacaggaggcgaggagggugaguggggacauggcagggcugagcugaugcucagcugacuccaugagaagggaagugaccuucacaugggggauacuggacagcacccucuaccugccuucagcaaccacugagaacacccggggcacacacggggcagggguggcacccagggucaccugucucccuaaggaggcccacuccucccccagaaagccaggggggaaaagcugcucaucacccaggguggcagaaacgucucccccagcaguugggcugcccagcagggccaccaggccucugucccagcugccuuaagaggcucuuucaaugggccagcuucagaaccauccaguguaccgcagcggccuggccugggaaaggauuucucagccugacuuuccagagaccgaggaugagaaaguuaggcggcaacagaacaaaacccccgccgcgagaugggucugcugcugccucaucugaguagguguaagaggggaggagaggugcccucaacacucacugcaguggcgcacggguuuuggauggggggacagcaucuuggcccucacagcuguggcagugccucugcgggccauggucccagccccccacccugagcaaugcuucccaggcccgcaggugcagcccccucugcccuuggcccaaccgugggccccuccagggagaugcucucggcugccuugcuacccaggggucggcuccgaggagaggcccaggugugagcagcagggaccuggucuauggccuaugccauggacaaggcagaaggacugccguugguggccugggggaugcgaggggaggggcaguucacaucgcagcucucuccgaacuccaccauuugggacgucuuuauuauggauccguccacucuuccaggagcaguagcccuucuaggaaaggggugggaagaaaaccagccuacccuucaagcugacuuaggaugcaaugguacagacaccagccuugggggaggguucuccauccacacuccuaccccaaacgggcuuugugcugcucaauggggauucggggccaucagaagcgaugccgcggcugggggccaaagugcaugggcagguugugcuccaggggcauguggaugggaccgaagucauaguugacccgcacguugggcagagggggcacguacggggcugggauaggccccauguugagugggaaguuguugaacacaggccgcacgggaggcagggggaagggugggugcgcgaaggcauaggguggcaucuguggcuguggcagguucugcggaacgggccucgggagggccuccacccucugcaccuucuccacaggcuucuccagcggggguccaaugcguuugaagguguucucuccauucuuucuuuucuguuccucuucagccuccuucuggauuuccucaauaagcuucucaucaucuucagugggaucgguccagagagagcaucuugaacacuccuggcaaggggcuccuggugagcggggauguuggcagaaauggucauauccauuaauagaaacucgacagagguagcacaucugggcaccacagcggcaagacaugcgguugcagccuucagauuugaugaggccagucccacacuuguggcauuuucuaaugcgggcagcagucauuuuuucuucaauagagguacgguacuugaugucgucuuuuucagccagcucuucacaggugaggccauuauguucuuuccagagucccugacacuuccuacagguuuccuuucggcagugaggauuaggacagcugaaccucuucacaucacuguccaacagagccggaaagcuacaggacgggcaccugacaagcucgucggcguaggcugccgcaaccuccuccucggcuuuucgcucauaguacuuauacaggauggucugggggagcaccuucuccagcucacugguugggaacgaacacgugcagcugccuuccaugcagcugagcuccaacuuuccagauccaaagacugccucuugggcauaucugaugagacacucuuugcagaacaagugagcaucugcgcacugcgucagcuccucgaauggaaauuccccauagcagcagcgacacucaaucagcuggccauccuuuugauacuguucuucauucaucuguagggcaagcaaaaagucuucaugcucugccaucucuuugauuuucugcucauagaacuccugcucuuguugcacagcuggaaggagagcacgucggucauaggaccuacaaugucgucgcuuauuuucaagaaagaacauccucuuuucuauuuuuaugucaccuuguucaaacuugaaaucaauguaagaauacugguucauuuguuuucucuucuuccuuuuuccacugguuucuggugacagcuccugccauuuuuuaauggcaucagacaaggccugacugaugaaguccgacgaggccucauguucaucccaagucugguuccucccccuggcuuuccccauuccgaugagggcaucauguuccuccucagaccccuugugucucuuucuuaucccugcucccagcucauaaucaucugaugucagcagagacuugcugcucagcuuuccgcuacuguggccgcucuucccucucuugcgggggggcgacagggcgcucggggcguggguccguuuccgcggccugccagggccucugcgugccaagcuucuaugggguuccucgcgccuguccucggagucccggcggcgcugcagcuucaccagcucacgcugcuucuccuuguacuggcgcugcaccucggccagccgcauccggaaguccagcuccagggcguccauguccuccagggaggacuucauggcauacauccgcuccuccuucuugcgcauccagcuguacuucuuguugggcuucagcucccgcgggagccgcagguucuugaguggguccaccacgggcccauccagcaccucccucagcauguggcugccagcugccagcagacucuccagggagggccgcgccaccagggcccgcuccgcaccucccaucucuuggcuccuccucuccagcuccagcucugcgaucucacuuagcagggugaugccaugcaggaagcucugcuccaagacaaggcucucggcugcuuccagcuucuccaaggccugggcuccagcagcacccggggagggcagaggccuggccuggggcagcuccgcagcugccgccagggcguucaugccagccaguggguccuccagacugggcaggaacuggucagagcuugccucuuccaggaagcaggugcugccgaguacaggcacggccucuuggggcuccaggcucgggcacugucccuccccggcgggcacgucacagucugacauuucuagggugggcugggacucgcucggugccaccugcgccaggccuuccucgggcacugccuccaccacgggcaccgccacaggcaccuccaccggcuccuccuuggccuccaccagugucucgggugucagcugcacccccagguccagggcggcggugcaggguucuguccggcccggggaauccacccgugguucaggccccuccacaaagucuggacacucagagggcucugcgcagcucugcccgguggcacucagcgccugggccuccaacaggccaccuccacaacccccugcagggcuggggguagccauggcuuccgcggcgggcaguggcagcggcgacuccagaggcggcagcucuguggggcccucguccauguccuccaccucugccuucaccucccgcucagccagcgguucuuccuccgggcccucccgcagcggcucugugaucuuggagggggacaagcggaugggcuugucuucgggugagagugccaggcgcucgggcccaucagccgggagcggcacaucaggggccaagccguccgcgucggcggcggccgugggcugcagcaggaaaggguagggccucccguagugcgguggcagggcuuggaacggguaccugggcgggauaucugagaacagggccuggaaggggcugggggcuuccuucuccaacuccaagucuuucuucucgaccacauucucgggagccuccuccuugcgggugauacccggggugggcgguggggaggcgggcggcgggcugguggggugggagcuggggguggcgggguaggcguaggcggguggcuuggacacguccuccagcuucuggaugaccuuggccuucagggcagccacaggggaugcgcggggugaugguggcgggcucacggccuugccguaggugcccgcggggccggcggccaggccagggggcuuccgcggcagcagcccggggccggcgguggccaggccagccuugcccgcagccuccaggccccgcuugcuccccuucucuuccaucuccgcccggugcuccugcgccuucaaccgcuccugcacgagcugggcgcuccucugcaguuccaaggccugggccgccugcugcugcagguacaggaacuccugcugccgcaggaagugcugcugugagaagagcugcagcugcugggcguggugcagggggcugcggcccggcggguacagggcgggccagaggggcgguacgguggcccgcuccaucagcuccgcaaagugaggaaggugaucacugggaaugaccaccagcuggcccgauugggggucccugacaaacugguaggcugacgggagggagccccccaggccaggugggaacgcaggggccaugcccuggugcagagaugggggacccaagccguagggguguccagcgagccacauggaugcguugcccgagcggggcaaccaggggugcguggccagaugggcugcggggucggcagaccagcgaccugagcccgccagcgccgggccccccgucaccaugagguugggguucaggccguuaggagcacagcugguagggugcaggcgggccaggucagccagcuccuuacucucucugagcagcuucuccugaucccgguccagccgugccccgagcagccguuccucccggugucuggcccggucguccacacaguccucaucugcucggccgugcccuuugacguuacucagcgacagagagcgcuccuggucuaccagcccaggccccagccggccacugccgccacuguccuucugccgggccacagccacugcaaugcccacaggcgggugucgcacuucugccucacccugggcaccagagcccucgcgcccgaaagcuuuggcgcucucgggccucucggggucccgcuucagcugccggccgccgcccgcugcagggccuccggagugugggagacgggccugggcucgggaggcacccgcagaggugggcgcaggcucggguuucauggugcccaaaccuccaaaggggcucuucuugccacagccaccagggcgcacggccacggcgucccgggcaaagcugccacuguacuuuauaaggcucugcauggccgaggccucuccagacccgugggccgcagagugcaugucagcgaccggccggccgcagguggccgccgagcggggcagcacagccccaggguccagguaggccuucuuggaggaggaggcagcgaccacggcggccuccucuucggcgcggcugugguggugcugcgcggccagcacggccaucugcguggcggcgaaguugcccagcucgaaggguuuccauuuaugcucagggccggugggcggggggcgcccgggcuccaggccgaagagcuuggcggccuguugggcugcaggaccggcugggccgcggggcgcacgcucgcagggccucggguccgccucgggcuugagcagcuccuuggcaggcacguaggcgcggggguccggggaggcgcguguggcccgcaccgugggggcauccgcggggggcggccgcuugagcgagcggaugaccgaguucuucucgcgcaggcccucgggccgguccagaggccgcggggagccggggggcgccugcaggaccccuggccugccagccucgcgcucgcgggcccgggcaucgcgcgccugggaugcgaucuggaugggccccgggcgcucgucgaaggccuccacggaaggcacgaaggugggcgccaccacgcggugcucacggcccugcucgcggaagacgguguagacgccggcggggguggccgcggggggugcaggaggccccuuggggggcgcgggcggcgggggcagcggugaggggcaggggcgcggcccagggagcagggucuccgugcgccgcagcagccgcgcgcccucguccugccgggcagccuccuuggcacccccgcgccccgcuucggccaccagcgcgggcagccccacguccccggcgccgccguugcacauggucaguaccgacggcugcagcgccgcauucuuggucuuggacucagccaggaagggcgacaggcgcucagccaggcgcgggggcccccgguccuggcggcccucggcgcgcgccuccugggucagguccaccacgccccguggccccgaggccuccucgccccgggcgcgcggguccuucuugccgaaaagcggaggcggcuccccgccgcggcccgcccgcuccuuggcuggaccgucccgcgacgacgagccuuuggccggggcgcccgaggaguggccgccgccagggguccgggccgagggcgcgugagagugcagggagcccggagcccccgcggugggcagguagaaaccgucuccuccuggccccugaccuuucuggguaucgaaaaugcugggcugacccagcuggcugaggagggggcucccacugcuggggggcuccaggugguucagguggagguaggauggguacagcccacugggcaggugggagaagccuucaugggcgugggcggcccacagcugcaccaugggcagguugcuagggguuggggagcggaaagacaggucagagggcaguggcacugggcucccaugggacgaggccgagggccccaucccgcuggccacaaagcugcccaagaaggccucgcccgggugcggauggagauucaggccggccauguacuucccgggcggcagcgggccgggcaagcccgaggcgggcaagcguccggcaguggccgcgcccacgcgguggcuguccauggccaggccggacagcagcggcggcgggggaccgugcacggaccgcuggggcccgaagucucggccauccauccuccgcgggagugccgcgaucagccccccacccggcccgcaggccuagcucagugggaccuaaaaguucggccucggcguagucccagaguccucgggcggcgggggcuccgcggcgugcauggcggcggccagcggggcuugcgcucggcggcgggcccgcggcccggggcgcacaggcggccggcgguggggccccuccgggcggccaggcggagcugcgcgaggcggcgcacacggcgucuggcgcggcuggguucacggcuccaggcuccggcgacaacgacuccggcggcggccccggcucccggcgcagcuaggcgccccugcugcccgccaucccgcggcc

SEQ ID NO: 2576-2632 - skipped (57 entries)

SEQ ID NO: 2633 - RNA, 4901 nt, Homo sapiens
uuaaguaacaaaaucuuauuuuuauuuuuauuuuuuuacagaaauucagguauuccaacaaauuucuuuacauuucuuggaccuuaaaaaaauuacacacaacuuuuggacgcaauacaacagaacagaaugagaaagggagucaccuuuuuuguuuuuuuuuuaaaaagauaaaaaccuacuucuuauauuuaauuaacaauuagugauuuacauguguauuaccuauauacaaaugguacaucgucaaugacccaucuucagagcacugugguaugcuaaauuacacuuagguuuuauggcaaaaacuuuuuuaaaacauucacauguggauaggaaguacuuucuuaguuuuguucauaccacuguuagugauguaggacucccgauggaauuuguaguuugcauggauuagagaaagccaauacccuuuguuuuuauuguagauaaaguagacagguaccucccuucaaauaaaauacgaauucuugaaaaguuguguguaauuaaauuuaguaaguaggguguuauggauguaguagggagcuaauacuuaaagcaacaaauaauccucagaaugacuaauacuuuaguuguagauacuaaguauucccuuaauuugguucuuuagaaaagccacaucucugugaauuggguuuuacuccuuugagcauacccauaauaugcuuuuagccauuugaaacauaaugccauuuauggugaaaagauggcccguaccagaaacauuuggcuaaaauaggaaugugguccuaacagagagaggguaagagaagugaacccugaucuguaucacuucuuguguuauccuccaucugauguucuagugauauacacugauuuguucugauuuugaauacaugaauaaaagcauucuacauguccauguuuucuccuuagguauagaacaugguuuggcuuccauuaaguacccuugcauguauuuuagcuuguguucauucucaggcaaugggcuauuucaauauuaaauauuuguuuguuguuggauauuagcaggauauguggugagggugaugaugggggaagccugggagcaaaugauuguugaaguccacugguuaguuguuaacuacuuccagaugucagccaacuaaaaugaaucugaguauuuuugaaaccaacauuaguaaacaaaaagguaacuuauuccuaccgaguuuuuuucaaccuguauaaguauacagucauuuauuucuaaggcuauuaaauuauuauuuauuuuguuaguaccacuuacuauuauuuagaaauauguuuaauggaaugauuuuuaaaaaaauaaaaaugagugcccaucaguaagggaaauagaagacauggauuucugauaacauguauggcaaagaaauaggaaaaaaguaggagacauuuuagauacuuauuuauaaaguauauuaaauuccuaugcauauacuagggagaauuagaaaaaaaguguuuauuugauaguagccuauaauauuacacgugagcuuccaaggugaaaaugaacuuuuucuauauuuuucagaguuccuugaugcuguuuccugaaagauagggaaaucuauguugcuugggaaccuaugauguaaagauguacuuccuguaauauacagcuugauggaguaauaguauauggcauaaacacuuucucaguaauaacuuguauggacagauuaaacagaacacagacuugguaaaaaguuugaagcguuacgucucuuaauaacugagugguuguaacuaauuacacagugaaguaaaugaaugguagagaugaagaaccaaaggucacggcuccuaugaaaacauucagaggcauuuucuaagaugcuuccucaauaaaugacgcuugaucagccucuuggcuauugagauaggaauaauuuagaacuaacugccuuuuuaaaaauucuguugaaagguuaaagcuuuuuguuuucaguuugauuuaaaaaggacaguuuacaaaccucaguacguauauauuuuacauguuaacucuagagcauuuauauuccucuuccuuauuuccugaauaugauuuuucaugaacguuuucugaucucauccaaugaguuuccaaugagcugguguuuaauccaugaucacaucucuuuccagaaaaucacucccaucucugcugaucuagauuuagaaagugcguugacaagugaauguuccauucuuguucauauucaucuauauacucugaucucucucaggcguauuccuucuugauguugauguacaaaagcuguuauucgauucguuuagcuguuauucgauuuguuuagcuguuauucgauuuguuuugugcucauucuagagaauauuggcuuagcagaaaugguguggucucacacuaccuuaguuugccuuaagcauuuccaucaucuuuguuuucugccuucaguuccucugccaucaagcugucuugucgauuaccaagcacaaaugcuagaaaugagaggaucagggcauccaaaauuccaauaauagccaggauguaugcccagcggacugagcaagccccaagaguguacuugucugucuuuucuccacacauccguuuuacuucaucugagucccagccaucagggaaaaucauacagccaagcacaaggcaggcagcugauuauuugauacugauagucucaguggagaaagcuuucuuuguuuaguuucugggcucuucauuuuguuggucguuccuucacaauccaaaguaauauucugauuuuguguaucuuuuucuuuugaaauaucuuugucuuuuuuuccuuuuuuccgucuggucucauaaccacuauugauauuuuccauggauucagaacuacguuuuagaacagggcacucuggguuuucuuugaggcaugcacaguccaccuuguacuuacaauuuccauagucaaaaucaaaggcaauaguaauuucaguucccuuuggaauacuguguauagaauaaauauaaagauguaugguuccaucuugaauuucaugccucaccucugcauuggguguacaagaccgccugaugaaucgagccucauucccaaaaguccuugcaucaacacacauuucuagcccaugaaauuuagaguagaauaacacaaaaggguauggucuuuuaaagaaauacccauuugcuucaaacuguucucucagcauaaacuucccucuguauucaaugauaagugcaucaggaggcaaaucuuuugcagauuuaagaauuuucuuauucuuuuguauauggcucucuacaggagguuugaagagcaaauuguugguauucaaaucggauuuauucaucucuuuuuugucauuuccauugccuaaucucagagcuauucuuugugccucccucugaacacccucacuguacugguuguuauuugcuucuucauaucgauccauccaugcuuugaucuuugucucccauccaaaauuugaaccaucagaugaaggaucaaucucuggagcugaacccuuaacucuugaugacuuccuagauccuucacgaaaugccuuuuuacauuuugaaauguguuguucuuucuccccgcuuuuuuuccuucuuuuaucauuaacuuuggaaacucuugaagcaguuaaaguaauugauguuggaguaugcugaaaugcaguauauaauuccacaggaaccucaucaccacucucaguugcacugguaucaccaucugacauauuuucccuuuuccggcguuguaguagcacugcccucucuuuauccaaauuccuaggcugacaacguucacauagauauguaucaggaauaugcugccuaucaauccccaugcagucaauauguugccaaacgcuucucuaggggaggaggccuuucuugguggcugaaccaggguugggggaggggagacugugguucugguucaaggagacuccagagugcugcauuugucacaacagaucauguauccaucaucauguguaaaaccacauaugcaccugguuacaucaguaccauaacuuccauccucagaugugcugauuguaguagcacuggaaguuucaucaaaauuaggagugguaaauaugccuacuucauuuuugcuaauaaggacugauggaggaggggaagccggaggugucggaggaggacgagcaccauaauuaugguccgcauagggcaaaccaauguaacugugugaaugaugugagcugcugguauauaacugguggggauaacuguuggauuucucaacuaccacagggcuagcuucuacggauucugguucugaaccugcagccauuuccaaguaugacgucucugcuguaucaacccccaaugggaucacuaugcucaugacguucgccucugguaaauucgauuacuauggaguccuaugcauugguauccaaaacacuggggcaugccagccacagugcucauugcaaacaucuaagugcauccacaaacccaugagaugucugguaaaucugagguccaagaaagaauaaaugucuucacaaaaccugcuuauccagaauagaccugugauguucacacacgagacacccgaaccccguuaugugcucgacccccaaggagucucuccgcaccuccgcgaacaggcgaccccccgacagcagccacugcggacacaggacccggcuccacacacccccuccccaaacagcagcgcgcagccucuucaccaggaaccgaggaguaggggagggggcagccaggcagucaacaggaacgcagagacgacggcgaggcugcucggagugucuaugcccacucuguugccgcucccgaacuccggcacggucuccgacucggcccccugcgcccgcucagugucacugccucucgcucugggaaaauggcggcg

SEQ ID NO: 2634 - RNA, 677 nt, Homo sapiens
ucauucuagagaauauuggcuuagcagaacuuuguuuucugccuucaguuccucugccaucaagcugucuugucgauuaccaagcacaaaugcuagaaaugagaggaucagggcauccaaaauuccaauaauagccaggauguaugcccagcggacugagcaagccccaagaguguacuugucugucuuuucuccacacauccguuuuacuucaucugagucccagccaucagggaaaaucauacagccaagcacaaggcaggcaguuacuggccaugguggcaggcaccuguaauccuggcuacgcgauaggcuaaggcaggagaauugccugaacccaggaggcagaaguugcagugagccaagauugugccacugcauuccagccugggugacagagugagacaauuuccauagucaaaaucaaaggcaauaguaauuucaguucccuuuggaauacuguguauagaauaaauauaaagauguaugguuccaucuugaauuucaugccucaccucugcauuggguguacaagaccgccugaugaaucgagccucauucccaaaaguccuugcaucaacacacauuucuagcccaugaaauuuagaguagaauaacacaaaaggguauggucuuuuaaagaaauacccauuugcuucaaacuguucucucagcau

SEQ ID NO: 2635 - RNA, 4690 nt, Homo sapiens
uuaaguaacaaaaucuuauuuuuauuuuuauuuuuuuacagaaauucagguauuccaacaaauuucuuuacauuucuuggaccuuaaaaaaauuacacacaacuuuuggacgcaauacaacagaacagaaugagaaagggagucaccuuuuuuguuuuuuuuuuaaaaagauaaaaaccuacuucuuauauuuaauuaacaauuagugauuuacauguguauuaccuauauacaaaugguacaucgucaaugacccaucuucagagcacugugguaugcuaaauuacacuuagguuuuauggcaaaaacuuuuuuaaaacauucacauguggauaggaaguacuuucuuaguuuuguucauaccacuguuagugauguaggacucccgauggaauuuguaguuugcauggauuagagaaagccaauacccuuuguuuuuauuguagauaaaguagacagguaccucccuucaaauaaaauacgaauucuugaaaaguuguguguaauuaaauuuaguaaguaggguguuauggauguaguagggagcuaauacuuaaagcaacaaauaauccucagaaugacuaauacuuuaguuguagauacuaaguauucccuuaauuugguucuuuagaaaagccacaucucugugaauuggguuuuacuccuuugagcauacccauaauaugcuuuuagccauuugaaacauaaugccauuuauggugaaaagauggcccguaccagaaacauuuggcuaaaauaggaaugugguccuaacagagagaggguaagagaagugaacccugaucuguaucacuucuuguguuauccuccaucugauguucuagugauauacacugauuuguucugauuuugaauacaugaauaaaagcauucuacauguccauguuuucuccuuagguauagaacaugguuuggcuuccauuaaguacccuugcauguauuuuagcuuguguucauucucaggcaaugggcuauuucaauauuaaauauuuguuuguuguuggauauuagcaggauauguggugagggugaugaugggggaagccugggagcaaaugauuguugaaguccacugguuaguuguuaacuacuuccagaugucagccaacuaaaaugaaucugaguauuuuugaaaccaacauuaguaaacaaaaagguaacuuauuccuaccgaguuuuuuucaaccuguauaaguauacagucauuuauuucuaaggcuauuaaauuauuauuuauuuuguuaguaccacuuacuauuauuuagaaauauguuuaauggaaugauuuuuaaaaaaauaaaaaugagugcccaucaguaagggaaauagaagacauggauuucugauaacauguauggcaaagaaauaggaaaaaaguaggagacauuuuagauacuuauuuauaaaguauauuaaauuccuaugcauauacuagggagaauuagaaaaaaaguguuuauuugauaguagccuauaauauuacacgugagcuuccaaggugaaaaugaacuuuuucuauauuuuucagaguuccuugaugcuguuuccugaaagauagggaaaucuauguugcuugggaaccuaugauguaaagauguacuuccuguaauauacagcuugauggaguaauaguauauggcauaaacacuuucucaguaauaacuuguauggacagauuaaacagaacacagacuugguaaaaaguuugaagcguuacgucucuuaauaacugagugguuguaacuaauuacacagugaaguaaaugaaugguagagaugaagaaccaaaggucacggcuccuaugaaaacauucagaggcauuuucuaagaugcuuccucaauaaaugacgcuugaucagccucuuggcuauugagauaggaauaauuuagaacuaacugccuuuuuaaaaauucuguugaaagguuaaagcuuuuuguuuucaguuugauuuaaaaaggacaguuuacaaaccucaguacguauauauuuuacauguuaacucuagagcauuuauauuccucuuccuuauuuccugaauaugauuuuucaugaacguuuucugaucucauccaaugaguuuccaaugagcugguguuuaauccaugaucacaucucuuuccagaaaaucacucccaucucugcugaucuagauuuagaaagugcguugacaagugaauguuccauucuuguucauauucaucuauauacucugaucucucucaggcguauuccuucuugauguugauguacaaaagcuguuauucgauucguuuagcuguuauucgauuuguuuagcuguuauucgauuuguuuugugcucauucuagagaauauuggcuuagcagaacuuuguuuucugccuucaguuccucugccaucaagcugucuugucgauuaccaagcacaaaugcuagaaaugagaggaucagggcauccaaaauuccaauaauagccaggauguaugcccagcggacugagcaagccccaagaguguacuugucugucuuuucuccacacauccguuuuacuucaucugagucccagccaucagggaaaaucauacagccaagcacaaggcaggcagcugauuauuugauacugauagucucaguggagaaagcuuucuuuguuuaguuucugggcucuucauuuuguuggucguuccuucacaauccaaaguaauauucugauuuuguguaucuuuuucuuuugaaauaucuuugucuuuuuuuccuuuuuuccgucuggucucauaaccacuauugauauuuuccauggauucagaacuacguuuuagaacagggcacucuggguuuucuuugaggcaugcacaguccaccuuguacuuacaauuuccauagucaaaaucaaaggcaauaguaauuucaguucccuuuggaauacuguguauagaauaaauauaaagauguaugguuccaucuugaauuucaugccucaccucugcauuggguguacaagaccgccugaugaaucgagccucauucccaaaaguccuugcaucaacacacauuucuagcccaugaaauuuagaguagaauaacacaaaaggguauggucuuuuaaagaaauacccauuugcuucaaacuguucucucagcauaaacuucccucuguauucaaugauaagugcaucaggaggcaaaucuuuugcagauuuaagaauuuucuuauucuuuuguauauggcucucuacaggagguuugaagagcaaauuguugguauucaaaucggauuuauucaucucuuuuuugucauuuccauugccuaaucucagagcuauucuuugugccucccucugaacacccucacuguacugguuguuauuugcuucuucauaucgauccauccaugcuuugaucuuugucucccauccaaaauuugaaccaucagaugaaggaucaaucucuggagcugaacccuuaacucuugaugacuuccuagauccuucacgaaaugccuuuuuacauuuugaaauguguuguucuuucuccccgcuuuuuuuccuucuuuuaucauuaacuuuggaaacucuugaagcaguuaaaguaauugauguuggaguaugcugaaaugcaguauauaauuccacaggaaccucaucaccacucucaguugcacugguaucaccaucugacauauuuucccuuuuccggcguuguaguagcacugcccucucuuuauccaaauuccuaggcugacaacguucacauagauauguaucaggaauaugcugccuaucaauccccaugcagucaauauguugccaaacgcugcauuugucacaacagaucauguauccaucaucauguguaaaaccacauaugcaccugguuacaucaguaccauaacuuccauccucagaugugcugauuguaguagcacuggaaguuucaucaaaauuaggagugguaaauaugccuacuucauuuuugcuaauaaggacugauggaggaggggaagccggaggugucggaggaggacgagcaccauaauuaugguccgcauagggcaaaccaauguaacugugugaaugaugugagcugcugguauauaacugguggggauaacuguuggauuucucaacuaccacagggcuagcuucuacggauucugguucugaaccugcagccauuuccaaguaugacgucucugcuguaucaacccccaaugggaucacuaugcucaugacguucgccucugguaaauucgauuacuauggaguccuaugcauugguauccaaaacacuggggcaugccagccacagugcucauugcaaacaucuaagugcauccacaaacccugugauguucacacacgagacacccgaaccccguuaugugcucgacccccaaggagucucuccgcaccuccgcgaacaggcgaccccccgacagcagccacugcggacacaggacccggcuccacacacccccuccccaaacagcagcgcgcagccucuucaccaggaaccgaggaguaggggagggggcagccaggcagucaacaggaacgcagagacgacggcgaggcugcucggagugucuaugcccacucuguugccgcucccgaacuccggcacggucuccgacucggcccccugcgcccgcucagugucacugccucucgcucugggaaaauggcggcg

SEQ ID NO: 2636 - RNA, 4853 nt, Homo sapiens
uuaaguaacaaaaucuuauuuuuauuuuuauuuuuuuacagaaauucagguauuccaacaaauuucuuuacauuucuuggaccuuaaaaaaauuacacacaacuuuuggacgcaauacaacagaacagaaugagaaagggagucaccuuuuuuguuuuuuuuuuaaaaagauaaaaaccuacuucuuauauuuaauuaacaauuagugauuuacauguguauuaccuauauacaaaugguacaucgucaaugacccaucuucagagcacugugguaugcuaaauuacacuuagguuuuauggcaaaaacuuuuuuaaaacauucacauguggauaggaaguacuuucuuaguuuuguucauaccacuguuagugauguaggacucccgauggaauuuguaguuugcauggauuagagaaagccaauacccuuuguuuuuauuguagauaaaguagacagguaccucccuucaaauaaaauacgaauucuugaaaaguuguguguaauuaaauuuaguaaguaggguguuauggauguaguagggagcuaauacuuaaagcaacaaauaauccucagaaugacuaauacuuuaguuguagauacuaaguauucccuuaauuugguucuuuagaaaagccacaucucugugaauuggguuuuacuccuuugagcauacccauaauaugcuuuuagccauuugaaacauaaugccauuuauggugaaaagauggcccguaccagaaacauuuggcuaaaauaggaaugugguccuaacagagagaggguaagagaagugaacccugaucuguaucacuucuuguguuauccuccaucugauguucuagugauauacacugauuuguucugauuuugaauacaugaauaaaagcauucuacauguccauguuuucuccuuagguauagaacaugguuuggcuuccauuaaguacccuugcauguauuuuagcuuguguucauucucaggcaaugggcuauuucaauauuaaauauuuguuuguuguuggauauuagcaggauauguggugagggugaugaugggggaagccugggagcaaaugauuguugaaguccacugguuaguuguuaacuacuuccagaugucagccaacuaaaaugaaucugaguauuuuugaaaccaacauuaguaaacaaaaagguaacuuauuccuaccgaguuuuuuucaaccuguauaaguauacagucauuuauuucuaaggcuauuaaauuauuauuuauuuuguuaguaccacuuacuauuauuuagaaauauguuuaauggaaugauuuuuaaaaaaauaaaaaugagugcccaucaguaagggaaauagaagacauggauuucugauaacauguauggcaaagaaauaggaaaaaaguaggagacauuuuagauacuuauuuauaaaguauauuaaauuccuaugcauauacuagggagaauuagaaaaaaaguguuuauuugauaguagccuauaauauuacacgugagcuuccaaggugaaaaugaacuuuuucuauauuuuucagaguuccuugaugcuguuuccugaaagauagggaaaucuauguugcuugggaaccuaugauguaaagauguacuuccuguaauauacagcuugauggaguaauaguauauggcauaaacacuuucucaguaauaacuuguauggacagauuaaacagaacacagacuugguaaaaaguuugaagcguuacgucucuuaauaacugagugguuguaacuaauuacacagugaaguaaaugaaugguagagaugaagaaccaaaggucacggcuccuaugaaaacauucagaggcauuuucuaagaugcuuccucaauaaaugacgcuugaucagccucuuggcuauugagauaggaauaauuuagaacuaacugccuuuuuaaaaauucuguugaaagguuaaagcuuuuuguuuucaguuugauuuaaaaaggacaguuuacaaaccucaguacguauauauuuuacauguuaacucuagagcauuuauauuccucuuccuuauuuccugaauaugauuuuucaugaacguuuucugaucucauccaaugaguuuccaaugagcugguguuuaauccaugaucacaucucuuuccagaaaaucacucccaucucugcugaucuagauuuagaaagugcguugacaagugaauguuccauucuuguucauauucaucuauauacucugaucucucucaggcguauuccuucuugauguugauguacaaaagcuguuauucgauucguuuagcuguuauucgauuuguuuagcuguuauucgauuuguuuugugcucauucuagagaauauuggcuuagcagaacuuuguuuucugccuucaguuccucugccaucaagcugucuugucgauuaccaagcacaaaugcuagaaaugagaggaucagggcauccaaaauuccaauaauagccaggauguaugcccagcggacugagcaagccccaagaguguacuugucugucuuuucuccacacauccguuuuacuucaucugagucccagccaucagggaaaaucauacagccaagcacaaggcaggcagcugauuauuugauacugauagucucaguggagaaagcuuucuuuguuuaguuucugggcucuucauuuuguuggucguuccuucacaauccaaaguaauauucugauuuuguguaucuuuuucuuuugaaauaucuuugucuuuuuuuccuuuuuuccgucuggucucauaaccacuauugauauuuuccauggauucagaacuacguuuuagaacagggcacucuggguuuucuuugaggcaugcacaguccaccuuguacuuacaauuuccauagucaaaaucaaaggcaauaguaauuucaguucccuuuggaauacuguguauagaauaaauauaaagauguaugguuccaucuugaauuucaugccucaccucugcauuggguguacaagaccgccugaugaaucgagccucauucccaaaaguccuugcaucaacacacauuucuagcccaugaaauuuagaguagaauaacacaaaaggguauggucuuuuaaagaaauacccauuugcuucaaacuguucucucagcauaaacuucccucuguauucaaugauaagugcaucaggaggcaaaucuuuugcagauuuaagaauuuucuuauucuuuuguauauggcucucuacaggagguuugaagagcaaauuguugguauucaaaucggauuuauucaucucuuuuuugucauuuccauugccuaaucucagagcuauucuuugugccucccucugaacacccucacuguacugguuguuauuugcuucuucauaucgauccauccaugcuuugaucuuugucucccauccaaaauuugaaccaucagaugaaggaucaaucucuggagcugaacccuuaacucuugaugacuuccuagauccuucacgaaaugccuuuuuacauuuugaaauguguuguucuuucuccccgcuuuuuuuccuucuuuuaucauuaacuuuggaaacucuugaagcaguuaaaguaauugauguuggaguaugcugaaaugcaguauauaauuccacaggaaccucaucaccacucucaguugcacugguaucaccaucugacauauuuucccuuuuccggcguuguaguagcacugcccucucuuuauccaaauuccuaggcugacaacguucacauagauauguaucaggaauaugcugccuaucaauccccaugcagucaauauguugccaaacgcuucucuaggggaggaggccuuucuugguggcugaaccaggguugggggaggggagacugugguucugguucaaggagacuccagagugcugcauuugucacaacagaucauguauccaucaucauguguaaaaccacauaugcaccugguuacaucaguaccauaacuuccauccucagaugugcugauuguaguagcacuggaaguuucaucaaaauuaggagugguaaauaugccuacuucauuuuugcuaauaaggacugauggaggaggggaagccggaggugucggaggaggacgagcaccauaauuaugguccgcauagggcaaaccaauguaacugugugaaugaugugagcugcugguauauaacugguggggauaacuguuggauuucucaacuaccacagggcuagcuucuacggauucugguucugaaccugcagccauuuccaaguaugacgucucugcuguaucaacccccaaugggaucacuaugcucaugacguucgccucugguaaauucgauuacuauggaguccuaugcauugguauccaaaacacuggggcaugccagccacagugcucauugcaaacaucuaagugcauccacaaacccaugagaugucugguaaaucugagguccaagaaagaauaaaugucuucacaaaaccugcuuauccagaauagaccugugauguucacacacgagacacccgaaccccguuaugugcucgacccccaaggagucucuccgcaccuccgcgaacaggcgaccccccgacagcagccacugcggacacaggacccggcuccacacacccccuccccaaacagcagcgcgcagccucuucaccaggaaccgaggaguaggggagggggcagccaggcagucaacaggaacgcagagacgacggcgaggcugcucggagugucuaugcccacucuguugccgcucccgaacuccggcacggucuccgacucggcccccugcgcccgcucagugucacugccucucgcucugggaaaauggcggcg

SEQ ID NO: 2637 - RNA, 665 nt, Homo sapiens
uuaagcauuuccaucaucuuuguuuucugccuucaguuccucugccaucaagcugucuugucgauuaccaagcacaaaugcuagaaaugagaggaucagggcauccaaaauuccaauaauagccaggauguaugcccagcggacugagcaagccccaagaguguacuugucugucuuuucuccacacauccguuuuacuucaucugagucccagccaucagggaaaaucauacagccaagcacaaggcaggcaguuacuggccaugguggcaggcaccuguaauccuggcuacgcgauaggcuaaggcaggagaauugccugaacccaggaggcagaaguugcagugagccaagauugugccacugcauuccagccugggugacagagugagacaauuuccauagucaaaaucaaaggcaauaguaauuucaguucccuuuggaauacuguguauagaauaaauauaaagauguaugguuccaucuugaauuucaugccucaccucugcauuggguguacaagaccgccugaugaaucgagccucauucccaaaaguccuugcaucaacacacauuucuagcccaugaaauuuagaguagaauaacacaaaaggguauggucuuuuaaagaaauacccauuugcuucaaacuguucucucagcau

SEQ ID NO: 2638 - RNA, 4738 nt, Homo sapiens
uuaaguaacaaaaucuuauuuuuauuuuuauuuuuuuacagaaauucagguauuccaacaaauuucuuuacauuucuuggaccuuaaaaaaauuacacacaacuuuuggacgcaauacaacagaacagaaugagaaagggagucaccuuuuuuguuuuuuuuuuaaaaagauaaaaaccuacuucuuauauuuaauuaacaauuagugauuuacauguguauuaccuauauacaaaugguacaucgucaaugacccaucuucagagcacugugguaugcuaaauuacacuuagguuuuauggcaaaaacuuuuuuaaaacauucacauguggauaggaaguacuuucuuaguuuuguucauaccacuguuagugauguaggacucccgauggaauuuguaguuugcauggauuagagaaagccaauacccuuuguuuuuauuguagauaaaguagacagguaccucccuucaaauaaaauacgaauucuugaaaaguuguguguaauuaaauuuaguaaguaggguguuauggauguaguagggagcuaauacuuaaagcaacaaauaauccucagaaugacuaauacuuuaguuguagauacuaaguauucccuuaauuugguucuuuagaaaagccacaucucugugaauuggguuuuacuccuuugagcauacccauaauaugcuuuuagccauuugaaacauaaugccauuuauggugaaaagauggcccguaccagaaacauuuggcuaaaauaggaaugugguccuaacagagagaggguaagagaagugaacccugaucuguaucacuucuuguguuauccuccaucugauguucuagugauauacacugauuuguucugauuuugaauacaugaauaaaagcauucuacauguccauguuuucuccuuagguauagaacaugguuuggcuuccauuaaguacccuugcauguauuuuagcuuguguucauucucaggcaaugggcuauuucaauauuaaauauuuguuuguuguuggauauuagcaggauauguggugagggugaugaugggggaagccugggagcaaaugauuguugaaguccacugguuaguuguuaacuacuuccagaugucagccaacuaaaaugaaucugaguauuuuugaaaccaacauuaguaaacaaaaagguaacuuauuccuaccgaguuuuuuucaaccuguauaaguauacagucauuuauuucuaaggcuauuaaauuauuauuuauuuuguuaguaccacuuacuauuauuuagaaauauguuuaauggaaugauuuuuaaaaaaauaaaaaugagugcccaucaguaagggaaauagaagacauggauuucugauaacauguauggcaaagaaauaggaaaaaaguaggagacauuuuagauacuuauuuauaaaguauauuaaauuccuaugcauauacuagggagaauuagaaaaaaaguguuuauuugauaguagccuauaauauuacacgugagcuuccaaggugaaaaugaacuuuuucuauauuuuucagaguuccuugaugcuguuuccugaaagauagggaaaucuauguugcuugggaaccuaugauguaaagauguacuuccuguaauauacagcuugauggaguaauaguauauggcauaaacacuuucucaguaauaacuuguauggacagauuaaacagaacacagacuugguaaaaaguuugaagcguuacgucucuuaauaacugagugguuguaacuaauuacacagugaaguaaaugaaugguagagaugaagaaccaaaggucacggcuccuaugaaaacauucagaggcauuuucuaagaugcuuccucaauaaaugacgcuugaucagccucuuggcuauugagauaggaauaauuuagaacuaacugccuuuuuaaaaauucuguugaaagguuaaagcuuuuuguuuucaguuugauuuaaaaaggacaguuuacaaaccucaguacguauauauuuuacauguuaacucuagagcauuuauauuccucuuccuuauuuccugaauaugauuuuucaugaacguuuucugaucucauccaaugaguuuccaaugagcugguguuuaauccaugaucacaucucuuuccagaaaaucacucccaucucugcugaucuagauuuagaaagugcguugacaagugaauguuccauucuuguucauauucaucuauauacucugaucucucucaggcguauuccuucuugauguugauguacaaaagcuguuauucgauucguuuagcuguuauucgauuuguuuagcuguuauucgauuuguuuugugcucauucuagagaauauuggcuuagcagaaaugguguggucucacacuaccuuaguuugccuuaagcauuuccaucaucuuuguuuucugccuucaguuccucugccaucaagcugucuugucgauuaccaagcacaaaugcuagaaaugagaggaucagggcauccaaaauuccaauaauagccaggauguaugcccagcggacugagcaagccccaagaguguacuugucugucuuuucuccacacauccguuuuacuucaucugagucccagccaucagggaaaaucauacagccaagcacaaggcaggcagcugauuauuugauacugauagucucaguggagaaagcuuucuuuguuuaguuucugggcucuucauuuuguuggucguuccuucacaauccaaaguaauauucugauuuuguguaucuuuuucuuuugaaauaucuuugucuuuuuuuccuuuuuuccgucuggucucauaaccacuauugauauuuuccauggauucagaacuacguuuuagaacagggcacucuggguuuucuuugaggcaugcacaguccaccuuguacuuacaauuuccauagucaaaaucaaaggcaauaguaauuucaguucccuuuggaauacuguguauagaauaaauauaaagauguaugguuccaucuugaauuucaugccucaccucugcauuggguguacaagaccgccugaugaaucgagccucauucccaaaaguccuugcaucaacacacauuucuagcccaugaaauuuagaguagaauaacacaaaaggguauggucuuuuaaagaaauacccauuugcuucaaacuguucucucagcauaaacuucccucuguauucaaugauaagugcaucaggaggcaaaucuuuugcagauuuaagaauuuucuuauucuuuuguauauggcucucuacaggagguuugaagagcaaauuguugguauucaaaucggauuuauucaucucuuuuuugucauuuccauugccuaaucucagagcuauucuuugugccucccucugaacacccucacuguacugguuguuauuugcuucuucauaucgauccauccaugcuuugaucuuugucucccauccaaaauuugaaccaucagaugaaggaucaaucucuggagcugaacccuuaacucuugaugacuuccuagauccuucacgaaaugccuuuuuacauuuugaaauguguuguucuuucuccccgcuuuuuuuccuucuuuuaucauuaacuuuggaaacucuugaagcaguuaaaguaauugauguuggaguaugcugaaaugcaguauauaauuccacaggaaccucaucaccacucucaguugcacugguaucaccaucugacauauuuucccuuuuccggcguuguaguagcacugcccucucuuuauccaaauuccuaggcugacaacguucacauagauauguaucaggaauaugcugccuaucaauccccaugcagucaauauguugccaaacgcugcauuugucacaacagaucauguauccaucaucauguguaaaaccacauaugcaccugguuacaucaguaccauaacuuccauccucagaugugcugauuguaguagcacuggaaguuucaucaaaauuaggagugguaaauaugccuacuucauuuuugcuaauaaggacugauggaggaggggaagccggaggugucggaggaggacgagcaccauaauuaugguccgcauagggcaaaccaauguaacugugugaaugaugugagcugcugguauauaacugguggggauaacuguuggauuucucaacuaccacagggcuagcuucuacggauucugguucugaaccugcagccauuuccaaguaugacgucucugcuguaucaacccccaaugggaucacuaugcucaugacguucgccucugguaaauucgauuacuauggaguccuaugcauugguauccaaaacacuggggcaugccagccacagugcucauugcaaacaucuaagugcauccacaaacccugugauguucacacacgagacacccgaaccccguuaugugcucgacccccaaggagucucuccgcaccuccgcgaacaggcgaccccccgacagcagccacugcggacacaggacccggcuccacacacccccuccccaaacagcagcgcgcagccucuucaccaggaaccgaggaguaggggagggggcagccaggcagucaacaggaacgcagagacgacggcgaggcugcucggagugucuaugcccacucuguugccgcucccgaacuccggcacggucuccgacucggcccccugcgcccgcucagugucacugccucucgcucugggaaaauggcggcg

SEQ ID NO: 2639-2640 - skipped (2 entries)

SEQ ID NO: 2641 - RNA, 2170 nt, Homo sapiens
uuauaccauuuugucauccuuaaaaaagugauuuauuggucucugauacuaaguuauucuucaguguauuauauugcuguucuucauaauuccauuaacaaauugggugucauuucagggcccaguauuaaauaaugaucuuucuuccucaguuugcuguacacagggaaaagacagaaaaaaauuccuauaugacaaguuuuuguuuguguccaauuacagaguuccauaagacuaugauuugaauauugugguacaacuuaaauuuggcacauuauuuaauuauccaaaguuuauuacauguuugagugcacauuaaagagauuauuuggcauaauugacaagauaaaauuucuguaccuuauuugacuaucagguguauaugugguauauuuauguauguguguguauagacacacauauacuccuaaauuaaauauauuuguauaaaaagcuaaagauuacuauguuaagauuaauucauuaaaaaaucuauuauauuaaauugcaucugcauucaaagcagaaauguaaaaaaacaaaucaguguacuaaauacacacgaauuuacaaaguaauugaaaaugaaauaaaaauuucuauugaaauguuauauucuuguuuaauuggcauuuaaguggcacuaucaaacuauggaaauaaacaucauuuuuuagauuguugagauaauaaagauucuacaagcauuaccauacccuuguacccucuaaauuaagauucagcauuauuauaguaggaaaaaauggcagauaauuuucuucuuuauuaauaugggaauucucaggaagcaauuagggcagugucugcacuccugggcuuguguuuucagcucuuccaucaguggaagucuggcuucucaggaaaggugcagccaguccgucuaauuaugaugcuugcugcauaguggccagcacggauacauucagucagaggcuugucagagaccaguugagacagaaaaccuccaacaaaugcaucuccagcuccauugguaucaauaauuucuuucuggucuugauccaagacagcaaaagcagugacuucacuuucuguagccauuauagugucaucucucccuugggugaagaucacgauucgcugccucuuugaguucaucuuuggcagggcuugugucuuuuuggcuaucucuuuaaugucuuuagucucaaagccuugcucucuagcaaaaguggcagcuuccuggucuuucucaugggguagaaggcugacaggugggagcgaggaugggaaugcacugggauacugaggugccccuuugccaucuaagcucccauaauugacccuguacugcgguccgucuuucaguaaccucccauuauucacagcgcguuuggcccccagucgcagccgcugcugaaaggcuggguuguugguggugcuugugagaucacuuugacuucugagauacuucucuauguucuucagggaggagccauucggcuccucaaguccuucaauugcucuccuuaaaaguuuauuccaauccacauugcggagaucauuacaugauccucuagaccccuuggcugacuuaggaaaagugccugguuuaacugaugaaaagcgcccaggguugucuggguccuuauaggaggcaaggccuuuguuggugacuuugagaacugagccauccugaacacugaguuccagcuguucagagacugucuucuuauccaacccaugggaaguacugaccgcauggcagauucucucuucagagggccuuugcuuuugcuuuuuuauuuucuguauagcuucaagaauccacucuguauaaaguggguuugcaaguuuuaccaugguugacaaaugacuucuucaacacaaaaguuacccauagagguucucuuuguauuuaacagaacuugcacauuugaaagucauuuacaauucaacaaauggacagaguauuccagacuguauuaagcaacaucuuacaaacauccauccuuaagagauucaaaagcagacaaacaggcaauguugaugguugucuuauuuuaccaacaggaaagacugcauucgggugaagaacaucuuuaacugggaaaucaagaccagaauuggaacuucaaacguuuuaacaguccaugacaaaaauggagauuauccaggucuucaggcaaau

SEQ ID NO: 2642 - RNA, 2506 nt, Homo sapiens
uuauaccauuuugucauccuuaaaaaagugauuuauuggucucugauacuaaguuauucuucaguguauuauauugcuguucuucauaauuccauuaacaaauugggugucauuucagggcccaguauuaaauaaugaucuuucuuccucaguuugcuguacacagggaaaagacagaaaaaaauuccuauaugacaaguuuuuguuuguguccaauuacagaguuccauaagacuaugauuugaauauugugguacaacuuaaauuuggcacauuauuuaauuauccaaaguuuauuacauguuugagugcacauuaaagagauuauuuggcauaauugacaagauaaaauuucuguaccuuauuugacuaucagguguauaugugguauauuuauguauguguguguauagacacacauauacuccuaaauuaaauauauuuguauaaaaagcuaaagauuacuauguuaagauuaauucauuaaaaaaucuauuauauuaaauugcaucugcauucaaagcagaaauguaaaaaaacaaaucaguguacuaaauacacacgaauuuacaaaguaauugaaaaugaaauaaaaauuucuauugaaauguuauauucuuguuuaauuggcauuuaaguggcacuaucaaacuauggaaauaaacaucauuuuuuagauuguugagauaauaaagauucuacaagcauuaccauacccuuguacccucuaaauuaagauucagcauuauuauaguaggaaaaaauggcagauaauuuucuucuuuauuaauaugggaauucucaggaagcaauuagggcagugucugcacuccugggcuuguguuuucagcucuuccaucaguggaagucuggcuucucaggaaaggugcagccaguccgucuaauuaugaugcuugcugcauaguggccagcacggauacauucagucagaggcuugucagagaccaguugagacagaaaaccuccaacaaaugcaucuccagcuccauugguaucaauaauuucuuucuggucuugauccaagacagcaaaagcagugacuucacuuucuguagccauuauagugucaucucucccuugggugaagaucacgauucgcugccucuuugaguucaucuuuggcagggcuugugucuuuuuggcuaucucuuuaaugucuuuagucucaaagccuugcucucuagcaaaaguggcagcuucugucucauuuccaaaaaguauaucaacauaaggcauaacuuucaucaaugauuccuuguagaacuggcuaauaaacggugcagauagauucaaagugaaaauccuguuguuuucagaagcauggugagccaccuuuaauacugacucuggggaaacuguaagaaaaaagcccuggucuuucucaugggguagaaggcugacaggugggagcgaggaugggaaugcacugggauacugaggugccccuuugccaucuaagcucccauaauugacccuguacugcgguccgucuuucaguaaccucccauuauucacagcgcguuuggcccccagucgcagccgcugcugaaaggcuggguuguugguggugcuugugagaucacuuugacuucugagauacuucucuauguucuucagggaggagccauucggcuccucaaguccuucaauugcucuccuuaaaaguuuauuccaauccacauugcggagaucauuacaugauccucuagaccccuuggcugacuuaggaaaagugccugguuuaacugaugaaaagcgcccaggguugucuggguccuuauaggaggcaaggccuuuguuggugacuuugagaacugagccauccugaacacugaguuccagcuguucagagacugucuucuuauccaacccaugggaaguacugaccgcauggcagauucucucuucagagggccuuugcuuuugcuuuuuuauuuucuguauagcuucaagaauccacucuguauaaaguggguuugcaaguuuuaccaugguugacaaaugacuucuucaacacaaaaguuacccauagagguucucuuuguauuuaacagaacuugcacauuugaaagucauuuacaauucaacaaauggacagaguauuccagacuguauuaagcaacaucuuacaaacauccauccuuaagagauucaaaagcagacaaacaggcaauguugaugguugucuuauuuuaccaacaggaaagacugcauucgggugaagaacaucuuuaacugggaaaucaagaccagaauuggaacuucaaacguuuuaacaguccaugacaaaaauggagauuauccaggucuucaggcaaaucuggcugcgcgccaccgccaccgcgccugccgggggcgcugccgcugccugagaaacugcggcugccgccuggaggaggugccgucgccuccgccaccgcugccgccgccgccagggguaggagcuaagccgccgccauuuugugucccccuguuguugucguug

SEQ ID NO: 2643 - RNA, 1175 nt, Homo sapiens
gguggaggagaggaggcggagggcugaccuuuugaucuugauaauccuauagcuuuccgcacagcuuguggcugagugcggcuuccuugaagaugaggcagucgccugggugcucggcguacagcgaggucagccgguacugguucuccguggugaugucgaucugguagccggugagcguguagcaggccuugcggaacuccuggaucuuggucuggaaaaccuccuugagccgcugguucuucagcucggcacucuccaccugcuucuucagcucugccaccuccuuggacgauggcagacucgcggcggcagccucaaggucggcugggacggugccuccucucuccauggcgcgcaggagcccgcgcagucgcucgcacuccgccugcagcuggcugugguccucgcgcaggcgcugccuggccacacuggugggguucaggcucaugugcagcacuuugguccugcucuggucauagucacccugcagagcucgccgcuccagcugugccuccagcauccucuuuuccuccuccagccgacuccgcucgccuuccagcuccucgaccuucaaccugagcguguccgccuccucccuggagaacaggaagcucuguucggcagagcuggacugagacuucagcaucuucagcuccaucuccagcaugucugcucuuuguuucuggccucccagcuccuccagggccugcgacagcugagccuccaucucggcgcuguggcugugcaccuucugcaccauauccucagccucccgcaugcgccgcgucagcuggggugaguacucggccggggucagcucgcugucguaggaccccaggauggcccgcauaccgucccgcuccugcugguagucgguguccucgggccggaacuggcugcuaguggccucccagcucaggucgaaguggggcagccggugcaggaggcucacccaccagggcgccgcguagcugaccccggccauggcggggcccggccgccuccggaugcgcgcggccugcgcggggcucccuugcuggcccggggcgcgggcuucagggacccgucgacccccgccuggccgcccgcaucauccgcgcgcuccugggcccggcccggcccggcucggcccggcucggcugcgcucggcuccgcucggccgcccgcgcccg

SEQ ID NO: 2644 - RNA, 747 nt, Homo sapiens
gugucuaggggagaagauuuuauuucacaaggugaggaacccaggcugguggccgacgcccacacaccaggcuccgggacgcauggggucugcacguggagagggugcuggccgccccagcaggaagcccgacguaggucccagcgugucugucagucaugcugcugcccuguggggcuggagaggcaggacgugcacccagccuguggcuggcggggcaggggaccugcaggucaggccaagcagaguggcuccggcuaugcccccgagccugcaggcuacgccacggucuggcggcugaagagcucgagggugagcgagcugaggaaggcagggaugcuguccuggcgccgcaggugcaccucgaugagcucgcccacggugugugagaacucugucuccaguagcugcaucuuggaacccgaggggcugguggccugcugguagucgguguccucgggccggaacuggcugcuaguggccucccagcucaggucgaaguggggcagccggugcaggaggcucacccaccagggcgccgcguagcugaccccggccauggcggggcccggccgccuccggaugcgcgcggccugcgcggggcucccuugcuggcccggggcgcgggcuucagggacccgucgacccccgccuggccgcccgcaucauccgcgcgcuccugggcccggcccggcccggcucggcccggcucggcugcgcucggcuccgcucggccgcccgcgcccg

SEQ ID NO: 2645 - RNA, 1403 nt, Homo sapiens
ugcuggcucgcaggacgcgaguguagagaugcggcuggcucuccuuuccucuucuagucugucuaccuugcccugugcuggcuucugggacugcgcugucccacugcgcagccuggcaucuuggaaggcguccccugccccggccccacacggacuucaguccuccccaggcaccacugccucuggacacacugacacacacgccuacggccgcagcccucauggaacgaagcccaaguugcgacagacagaggcugagaaagucagggggacagccuagggucuucugcacccaggagguccagggcugcaaagccacauaggguuggcccaaggcugagaagccucagggggugacgaggacgggccagugcaccuccuucccgcccagcccuccacaccauccccuuuggacgcgaggcugcuccuuugcugagggcuacggucggaucuccccacaggaggagacagagagcgagacagccggagagccgucacacgcaggacccaccuugaagaugaggcagucgccugggugcucggcguacagcgaggucagccgguacugguucuccguggugaugucgaucugguagccggugagcguguagcaggccuugcggaacuccuggaucuuggucuggaaaaccuccuugagccgcugguucuucagcucggcacucuccaccugcuucuucagcucugccaccuccuuggacgauggcagacucgcggcggcagccucaaggucggcugggacggugccuccucucuccauggcgcgcaggagcccgcgcagucgcucgcacuccgccugcagcuggcugugguccucgcgcaggcgcugccuggccacacuggugggguucaggcucaugugcagcacuuugguccugcucuggucauagucacccugcagagcucgccgcuccagcugugccuccagcauccucuuuuccuccuccagccgacuccgcucgccuuccagcuccucgaccuucaaccugagcguguccgccuccucccuggagaacaggaagcucuguucggcagagcuggacugagacuucagcaucuucagcuccaucuccagcugcugguagucgguguccucgggccggaacuggcugcuaguggccucccagcucaggucgaaguggggcagccggugcaggaggcucacccaccagggcgccgcguagcugaccccggccauggcggggcccggccgccuccggaugcgcgcggccugcgcggggcucccuugcuggcccggggcgcgggcuucagggacccgucgacccccgccuggccgcccgcaucauccgcgcgcuccugggcccggcccggcccggcucggcccggcucggcugcgcucggcuccgcucggccgcccgcgcccg

SEQ ID NO: 2646 - RNA, 1034 nt, Homo sapiens
gguggaggagaggaggcggagggcugaccuuuugaucuugauaauccuauagcuuuccgcacagcuuguggcugagugcggcuuccuugaagaugaggcagucgccugggugcucggcguacagcgaggucagccgguacugguucuccguggugaugucgaucugguagccggugagcguguagcaggccuugcggaacuccuggaucuuggucuggaaaaccuccuugagccgcugguucuucagcucggcacucuccaccugcuucuucagcucugccaccuccuuggacgauggcagacucgcggcggcagccucaaggucggcugggacggugccuccucucuccauggcgcgcaggagcccgcgcagucgcucgcacuccgccugcagcuggcugugguccucgcgcaggcgcugccuggccacacuggugggguucaggcucaugugcagcacuuugguccugcucuggucauagucacccugcagagcucgccgcuccagcugugccuccagcauccucuuuuccuccuccagccgacuccgcucgccuuccagcuccucgaccuucaaccugagcguguccgccuccucccuggagaacaggaagcucuguucggcagagcuggacugagacuucagcaucuucagcuccaucuccagcaugucugcucuuuguuucuggccucccagcuccuccagggccugcgacagcugagccugcugguagucgguguccucgggccggaacuggcugcuaguggccucccagcucaggucgaaguggggcagccggugcaggaggcucacccaccagggcgccgcguagcugaccccggccauggcggggcccggccgccuccggaugcgcgcggccugcgcggggcucccuugcuggcccggggcgcgggcuucagggacccgucgacccccgccuggccgcccgcaucauccgcgcgcuccugggcccggcccggcccggcucggcccggcucggcugcgcucggcuccgcucggccgcccgcgcccg

SEQ ID NO: 2647 - RNA, 1329 nt, Homo sapiens
gugucuaggggagaagauuuuauuucacaaggugaggaacccaggcugguggccgacgcccacacaccaggcuccgggacgcauggggucugcacguggagagggugcuggccgccccagcaggaagcccgacguaggucccagcgugucugucagucaugcugcugcccuguggggcuggagaggcaggacgugcacccagccuguggcuggcggggcaggggaccugcaggucaggccaagcagaguggcuccggcuaugcccccgagccugcaggcuacgccacggucuggcggcugaagagcucgagggugagcgagcugaggaaggcagggaugcuguccuggcgccgcaggugcaccucgaugagcucgcccacggugugugagaacucugucuccaguagcugcaucuuggaacccgaggggcugguggccuugaagaugaggcagucgccugggugcucggcguacagcgaggucagccgguacugguucuccguggugaugucgaucugguagccggugagcguguagcaggccuugcggaacuccuggaucuuggucuggaaaaccuccuugagccgcugguucuucagcucggcacucuccaccugcuucuucagcucugccaccuccuuggacgauggcagacucgcggcggcagccucaaggucggcugggacggugccuccucucuccauggcgcgcaggagcccgcgcagucgcucgcacuccgccugcagcuggcugugguccucgcgcaggcgcugccuggccacacuggugggguucaggcucaugugcagcacuuugguccugcucuggucauagucacccugcagagcucgccgcuccagcugugccuccagcauccucuuuuccuccuccagccgacuccgcucgccuuccagcuccucgaccuucaaccugagcguguccgccuccucccuggagaacaggaagcucuguucggcagagcuggacugagacuucagcaucuucagcuccaucuccagcugcugguagucgguguccucgggccggaacuggcugcuaguggccucccagcucaggucgaaguggggcagccggugcaggaggcucacccaccagggcgccgcguagcugaccccggccauggcggggcccggccgccuccggaugcgcgcggccugcgcggggcucccuugcuggcccggggcgcgggcuucagggacccgucgacccccgccuggccgcccgcaucauccgcgcgcuccugggcccggcccggcccggcucggcccggcucggcugcgcucggcuccgcucggccgcccgcgcccg

SEQ ID NO: 2648 - RNA, 1386 nt, Homo sapiens
gugucuaggggagaagauuuuauuucacaaggugaggaacccaggcugguggccgacgcccacacaccaggcuccgggacgcauggggucugcacguggagagggugcuggccgccccagcaggaagcccgacguaggucccagcgugucugucagucaugcugcugcccuguggggcuggagaggcaggacgugcacccagccuguggcuggcggggcaggggaccugcaggucaggccaagcagaguggcuccggcuaugcccccgagccugcaggcuacgccacggucuggcggcugaagagcucgagggugagcgagcugaggaaggcagggaugcuguccuggcgccgcaggugcaccucgaugagcucgcccacggugugugagaacucugucuccaguagcugcaucuuggaacccgaggggcugguggccuugaagaugaggcagucgccugggugcucggcguacagcgaggucagccgguacugguucuccguggugaugucgaucugguagccggugagcguguagcaggccuugcggaacuccuggaucuuggucuggaaaaccuccuugagccgcugguucuucagcucggcacucuccaccugcuucuucagcucugccaccuccuuggacgauggcagacucgcggcggcagccucaaggucggcugggacggugccuccucucuccauggcgcgcaggagcccgcgcagucgcucgcacuccgccugcagcuggcugugguccucgcgcaggcgcugccuggccacacuggugggguucaggcucaugugcagcacuuugguccugcucuggucauagucacccugcagagcucgccgcuccagcugugccuccagcauccucuuuuccuccuccagccgacuccgcucgccuuccagcuccucgaccuucaaccugagcguguccgccuccucccuggagaacaggaagcucuguucggcagagcuggacugagacuucagcaucuucagcuccaucuccagcaugucugcucuuuguuucuggccucccagcuccuccagggccugcgacagcugagccugcugguagucgguguccucgggccggaacuggcugcuaguggccucccagcucaggucgaaguggggcagccggugcaggaggcucacccaccagggcgccgcguagcugaccccggccauggcggggcccggccgccuccggaugcgcgcggccugcgcggggcucccuugcuggcccggggcgcgggcuucagggacccgucgacccccgccuggccgcccgcaucauccgcgcgcuccugggcccggcccggcccggcucggcccggcucggcugcgcucggcuccgcucggccgcccgcgcccg

SEQ ID NO: 2649 - RNA, 797 nt, Homo sapiens
gguggaggagaggaggcggagggcugaccuuuugaucuugauaauccuauagcuuuccgcacagcuuguggcugagugcggcuuccuugaagaugaggcagucgccugggugcucggcguacagcgaggucagccgguacugguucuccguggugaugucgaucugguagccggugagcguguagcaggccuugcggaacuccuggaucuuggucuggaaaaccuccuugagccgcugguucuucagcucggcacucuccaccugcuucuucagcucugccaccuccuuggacgauggcagacucgcggcggcagccucaaggucggcugggacggugccuccucucuccauggcgcgcaggagcccgcgcagucgcucgcacuccgccugcagcuggcugugguccucgcgcaggcgcugccuggccacacuggugggguucaggcucaugugcagcacuuugguccugcucuggucauagucacccugcugguagucgguguccucgggccggaacuggcugcuaguggccucccagcucaggucgaaguggggcagccggugcaggaggcucacccaccagggcgccgcguagcugaccccggccauggcggggcccggccgccuccggaugcgcgcggccugcgcggggcucccuugcuggcccggggcgcgggcuucagggacccgucgacccccgccuggccgcccgcaucauccgcgcgcuccugggcccggcccggcccggcucggcccggcucggcugcgcucggcuccgcucggccgcccgcgcccg

SEQ ID NO: 2650 - RNA, 1431 nt, Homo sapiens
gugucuaggggagaagauuuuauuucacaaggugaggaacccaggcugguggccgacgcccacacaccaggcuccgggacgcauggggucugcacguggagagggugcuggccgccccagcaggaagcccgacguaggucccagcgugucugucagucaugcugcugcccuguggggcuggagaggcaggacgugcacccagccuguggcuggcggggcaggggaccugcaggucaggccaagcagaguggcuccggcuaugcccccgagccugcaggcuacgccacggucuggcggcugaagagcucgagggugagcgagcugaggaaggcagggaugcuguccuggcgccgcaggugcaccucgaugagcucgcccacggugugugagaacucugucuccaguagcugcaucuuggaacccgaggggcugguggccuugaagaugaggcagucgccugggugcucggcguacagcgaggucagccgguacugguucuccguggugaugucgaucugguagccggugagcguguagcaggccuugcggaacuccuggaucuuggucuggaaaaccuccuugagccgcugguucuucagcucggcacucuccaccugcuucuucagcucugccaccuccuuggacgauggcagacucgcggcggcagccucaaggucggcugggacggugccuccucucuccauggcgcgcaggagcccgcgcagucgcucgcacuccgccugcagcuggcugugguccucgcgcaggcgcugccuggccacacuggugggguucaggcucaugugcagcacuuugguccugcucuggucauagucaccgcgguccuggaccccggccaccgugcgguuggcguggcggagcgaguagguggcccuauggaugccaucacuggucuccccguugccguagaaucccacugcgaugccggcgcugcacaccagcguggcgaugaugacacaccaggccgugcagcagcagucggcguccaggugcuccucgcucuugcgccgccggcagcacagccagaaggaguagaagagcaggaagaggagguccagggcgaggcaggccagggcggcggcccccaggagcagcagggccugcugguagucgguguccucgggccggaacuggcugcuaguggccucccagcucaggucgaaguggggcagccggugcaggaggcucacccaccagggcgccgcguagcugaccccggccauggcggggcccggccgccuccggaugcgcgcggccugcgcggggcucccuugcuggcccggggcgcgggcuucagggacccgucgacccccgccuggccgcccgcaucauccgcgcgcuccugggcccggcccggcccggcucggcccggcucggcugcgcucggcuccgcucggccgcccgcgcccg

SEQ ID NO: 2651 - RNA, 1223 nt, Homo sapiens
ugcuggcucgcaggacgcgaguguagagaugcggcuggcucuccuuuccucuucuagucugucuaccuugcccugugcuggcuucugggacugcgcugucccacugcgcagccuggcaucuuggaaggcguccccugccccggccccacacggacuucaguccuccccaggcaccacugccucuggacacacugacacacacgccuacggccgcagcccucauggaacgaagcccaaguugcgacagacagaggcugagaaagucagggggacagccuagggucuucugcacccaggagguccagggcugcaaagccacauaggguuggcccaaggcugagaagccucagggggugacgaggacgggccagugcaccuccuucccgcccagcccuccacaccauccccuuuggacgcgaggcugcuccuuugcugagggcuacggucggaucuccccacaggaggagacagagagcgagacagccggagagccgucacacgcaggacccaccuugaagaugaggcagucgccugggugcucggcguacagcgaggucagccgguacugguucuccguggugaugucgaucugguagccggugagcguguagcaggccuugcggaacuccuggaucuuggucuggaaaaccuccuugagccgcugguucuucagcucggcacucuccaccugcuucuucagcucugccaccuccuuggacgauggcagacucgcggcggcagccucaaggucggcugggacggugccuccucucuccauggcgcgcaggagcccgcgcagucgcucgcacuccgccugcagcuggcugugguccucgcgcaggcgcugccuggccacacuggugggguucaggcucaugugcagcacuuugguccugcucuggucauagucacccugcugguagucgguguccucgggccggaacuggcugcuaguggccucccagcucaggucgaaguggggcagccggugcaggaggcucacccaccagggcgccgcguagcugaccccggccauggcggggcccggccgccuccggaugcgcgcggccugcgcggggcucccuugcuggcccggggcgcgggcuucagggacccgucgacccccgccuggccgcccgcaucauccgcgcgcuccugggcccggcccggcccggcucggcccggcucggcugcgcucggcuccgcucggccgcccgcgcccg

SEQ ID NO: 2652 - RNA, 1149 nt, Homo sapiens
gugucuaggggagaagauuuuauuucacaaggugaggaacccaggcugguggccgacgcccacacaccaggcuccgggacgcauggggucugcacguggagagggugcuggccgccccagcaggaagcccgacguaggucccagcgugucugucagucaugcugcugcccuguggggcuggagaggcaggacgugcacccagccuguggcuggcggggcaggggaccugcaggucaggccaagcagaguggcuccggcuaugcccccgagccugcaggcuacgccacggucuggcggcugaagagcucgagggugagcgagcugaggaaggcagggaugcuguccuggcgccgcaggugcaccucgaugagcucgcccacggugugugagaacucugucuccaguagcugcaucuuggaacccgaggggcugguggccuugaagaugaggcagucgccugggugcucggcguacagcgaggucagccgguacugguucuccguggugaugucgaucugguagccggugagcguguagcaggccuugcggaacuccuggaucuuggucuggaaaaccuccuugagccgcugguucuucagcucggcacucuccaccugcuucuucagcucugccaccuccuuggacgauggcagacucgcggcggcagccucaaggucggcugggacggugccuccucucuccauggcgcgcaggagcccgcgcagucgcucgcacuccgccugcagcuggcugugguccucgcgcaggcgcugccuggccacacuggugggguucaggcucaugugcagcacuuugguccugcucuggucauagucacccugcugguagucgguguccucgggccggaacuggcugcuaguggccucccagcucaggucgaaguggggcagccggugcaggaggcucacccaccagggcgccgcguagcugaccccggccauggcggggcccggccgccuccggaugcgcgcggccugcgcggggcucccuugcuggcccggggcgcgggcuucagggacccgucgacccccgccuggccgcccgcaucauccgcgcgcuccugggcccggcccggcccggcucggcccggcucggcugcgcucggcuccgcucggccgcccgcgcccg

SEQ ID NO: 2653 - RNA, 977 nt, Homo sapiens
gguggaggagaggaggcggagggcugaccuuuugaucuugauaauccuauagcuuuccgcacagcuuguggcugagugcggcuuccuugaagaugaggcagucgccugggugcucggcguacagcgaggucagccgguacugguucuccguggugaugucgaucugguagccggugagcguguagcaggccuugcggaacuccuggaucuuggucuggaaaaccuccuugagccgcugguucuucagcucggcacucuccaccugcuucuucagcucugccaccuccuuggacgauggcagacucgcggcggcagccucaaggucggcugggacggugccuccucucuccauggcgcgcaggagcccgcgcagucgcucgcacuccgccugcagcuggcugugguccucgcgcaggcgcugccuggccacacuggugggguucaggcucaugugcagcacuuugguccugcucuggucauagucacccugcagagcucgccgcuccagcugugccuccagcauccucuuuuccuccuccagccgacuccgcucgccuuccagcuccucgaccuucaaccugagcguguccgccuccucccuggagaacaggaagcucuguucggcagagcuggacugagacuucagcaucuucagcuccaucuccagcugcugguagucgguguccucgggccggaacuggcugcuaguggccucccagcucaggucgaaguggggcagccggugcaggaggcucacccaccagggcgccgcguagcugaccccggccauggcggggcccggccgccuccggaugcgcgcggccugcgcggggcucccuugcuggcccggggcgcgggcuucagggacccgucgacccccgccuggccgcccgcaucauccgcgcgcuccugggcccggcccggcccggcucggcccggcucggcugcgcucggcuccgcucggccgcccgcgcccg

SEQ ID NO: 2654 - RNA, 1527 nt, Homo sapiens
gugucuaggggagaagauuuuauuucacaaggugaggaacccaggcugguggccgacgcccacacaccaggcuccgggacgcauggggucugcacguggagagggugcuggccgccccagcaggaagcccgacguaggucccagcgugucugucagucaugcugcugcccuguggggcuggagaggcaggacgugcacccagccuguggcuggcggggcaggggaccugcaggucaggccaagcagaguggcuccggcuaugcccccgagccugcaggcuacgccacggucuggcggcugaagagcucgagggugagcgagcugaggaaggcagggaugcuguccuggcgccgcaggugcaccucgaugagcucgcccacggugugugagaacucugucuccaguagcugcaucuuggaacccgaggggcugguggccuugaagaugaggcagucgccugggugcucggcguacagcgaggucagccgguacugguucuccguggugaugucgaucugguagccggugagcguguagcaggccuugcggaacuccuggaucuuggucuggaaaaccuccuugagccgcugguucuucagcucggcacucuccaccugcuucuucagcucugccaccuccuuggacgauggcagacucgcggcggcagccucaaggucggcugggacggugccuccucucuccauggcgcgcaggagcccgcgcagucgcucgcacuccgccugcagcuggcugugguccucgcgcaggcgcugccuggccacacuggugggguucaggcucaugugcagcacuuugguccugcucuggucauagucacccugcagagcucgccgcuccagcugugccuccagcauccucuuuuccuccuccagccgacuccgcucgccuuccagcuccucgaccuucaaccugagcguguccgccuccucccuggagaacaggaagcucuguucggcagagcuggacugagacuucagcaucuucagcuccaucuccagcaugucugcucuuuguuucuggccucccagcuccuccagggccugcgacagcugagccuccaucucggcgcuguggcugugcaccuucugcaccauauccucagccucccgcaugcgccgcgucagcuggggugaguacucggccggggucagcucgcugucguaggaccccaggauggcccgcauaccgucccgcuccugcugguagucgguguccucgggccggaacuggcugcuaguggccucccagcucaggucgaaguggggcagccggugcaggaggcucacccaccagggcgccgcguagcugaccccggccauggcggggcccggccgccuccggaugcgcgcggccugcgcggggcucccuugcuggcccggggcgcgggcuucagggacccgucgacccccgccuggccgcccgcaucauccgcgcgcuccugggcccggcccggcccggcucggcccggcucggcugcgcucggcuccgcucggccgcccgcgcccg

SEQ ID NO: 2655 - RNA, 1505 nt, Homo sapiens
ugcuggcucgcaggacgcgaguguagagaugcggcuggcucuccuuuccucuucuagucugucuaccuugcccugugcuggcuucugggacugcgcugucccacugcgcagccuggcaucuuggaaggcguccccugccccggccccacacggacuucaguccuccccaggcaccacugccucuggacacacugacacacacgccuacggccgcagcccucauggaacgaagcccaaguugcgacagacagaggcugagaaagucagggggacagccuagggucuucugcacccaggagguccagggcugcaaagccacauaggguuggcccaaggcugagaagccucagggggugacgaggacgggccagugcaccuccuucccgcccagcccuccacaccauccccuuuggacgcgaggcugcuccuuugcugagggcuacggucggaucuccccacaggaggagacagagagcgagacagccggagagccgucacacgcaggacccaccuugaagaugaggcagucgccugggugcucggcguacagcgaggucagccgguacugguucuccguggugaugucgaucugguagccggugagcguguagcaggccuugcggaacuccuggaucuuggucuggaaaaccuccuugagccgcugguucuucagcucggcacucuccaccugcuucuucagcucugccaccuccuuggacgauggcagacucgcggcggcagccucaaggucggcugggacggugccuccucucuccauggcgcgcaggagcccgcgcagucgcucgcacuccgccugcagcuggcugugguccucgcgcaggcgcugccuggccacacuggugggguucaggcucaugugcagcacuuugguccugcucuggucauagucaccgcgguccuggaccccggccaccgugcgguuggcguggcggagcgaguagguggcccuauggaugccaucacuggucuccccguugccguagaaucccacugcgaugccggcgcugcacaccagcguggcgaugaugacacaccaggccgugcagcagcagucggcguccaggugcuccucgcucuugcgccgccggcagcacagccagaaggaguagaagagcaggaagaggagguccagggcgaggcaggccagggcggcggcccccaggagcagcagggccugcugguagucgguguccucgggccggaacuggcugcuaguggccucccagcucaggucgaaguggggcagccggugcaggaggcucacccaccagggcgccgcguagcugaccccggccauggcggggcccggccgccuccggaugcgcgcggccugcgcggggcucccuugcuggcccggggcgcgggcuucagggacccgucgacccccgccuggccgcccgcaucauccgcgcgcuccugggcccggcccggcccggcucggcccggcucggcugcgcucggcuccgcucggccgcccgcgcccg

SEQ ID NO: 2656 - RNA, 1460 nt, Homo sapiens
ugcuggcucgcaggacgcgaguguagagaugcggcuggcucuccuuuccucuucuagucugucuaccuugcccugugcuggcuucugggacugcgcugucccacugcgcagccuggcaucuuggaaggcguccccugccccggccccacacggacuucaguccuccccaggcaccacugccucuggacacacugacacacacgccuacggccgcagcccucauggaacgaagcccaaguugcgacagacagaggcugagaaagucagggggacagccuagggucuucugcacccaggagguccagggcugcaaagccacauaggguuggcccaaggcugagaagccucagggggugacgaggacgggccagugcaccuccuucccgcccagcccuccacaccauccccuuuggacgcgaggcugcuccuuugcugagggcuacggucggaucuccccacaggaggagacagagagcgagacagccggagagccgucacacgcaggacccaccuugaagaugaggcagucgccugggugcucggcguacagcgaggucagccgguacugguucuccguggugaugucgaucugguagccggugagcguguagcaggccuugcggaacuccuggaucuuggucuggaaaaccuccuugagccgcugguucuucagcucggcacucuccaccugcuucuucagcucugccaccuccuuggacgauggcagacucgcggcggcagccucaaggucggcugggacggugccuccucucuccauggcgcgcaggagcccgcgcagucgcucgcacuccgccugcagcuggcugugguccucgcgcaggcgcugccuggccacacuggugggguucaggcucaugugcagcacuuugguccugcucuggucauagucacccugcagagcucgccgcuccagcugugccuccagcauccucuuuuccuccuccagccgacuccgcucgccuuccagcuccucgaccuucaaccugagcguguccgccuccucccuggagaacaggaagcucuguucggcagagcuggacugagacuucagcaucuucagcuccaucuccagcaugucugcucuuuguuucuggccucccagcuccuccagggccugcgacagcugagccugcugguagucgguguccucgggccggaacuggcugcuaguggccucccagcucaggucgaaguggggcagccggugcaggaggcucacccaccagggcgccgcguagcugaccccggccauggcggggcccggccgccuccggaugcgcgcggccugcgcggggcucccuugcuggcccggggcgcgggcuucagggacccgucgacccccgccuggccgcccgcaucauccgcgcgcuccugggcccggcccggcccggcucggcccggcucggcugcgcucggcuccgcucggccgcccgcgcccg

SEQ ID NO: 2657 - RNA, 1601 nt, Homo sapiens
ugcuggcucgcaggacgcgaguguagagaugcggcuggcucuccuuuccucuucuagucugucuaccuugcccugugcuggcuucugggacugcgcugucccacugcgcagccuggcaucuuggaaggcguccccugccccggccccacacggacuucaguccuccccaggcaccacugccucuggacacacugacacacacgccuacggccgcagcccucauggaacgaagcccaaguugcgacagacagaggcugagaaagucagggggacagccuagggucuucugcacccaggagguccagggcugcaaagccacauaggguuggcccaaggcugagaagccucagggggugacgaggacgggccagugcaccuccuucccgcccagcccuccacaccauccccuuuggacgcgaggcugcuccuuugcugagggcuacggucggaucuccccacaggaggagacagagagcgagacagccggagagccgucacacgcaggacccaccuugaagaugaggcagucgccugggugcucggcguacagcgaggucagccgguacugguucuccguggugaugucgaucugguagccggugagcguguagcaggccuugcggaacuccuggaucuuggucuggaaaaccuccuugagccgcugguucuucagcucggcacucuccaccugcuucuucagcucugccaccuccuuggacgauggcagacucgcggcggcagccucaaggucggcugggacggugccuccucucuccauggcgcgcaggagcccgcgcagucgcucgcacuccgccugcagcuggcugugguccucgcgcaggcgcugccuggccacacuggugggguucaggcucaugugcagcacuuugguccugcucuggucauagucacccugcagagcucgccgcuccagcugugccuccagcauccucuuuuccuccuccagccgacuccgcucgccuuccagcuccucgaccuucaaccugagcguguccgccuccucccuggagaacaggaagcucuguucggcagagcuggacugagacuucagcaucuucagcuccaucuccagcaugucugcucuuuguuucuggccucccagcuccuccagggccugcgacagcugagccuccaucucggcgcuguggcugugcaccuucugcaccauauccucagccucccgcaugcgccgcgucagcuggggugaguacucggccggggucagcucgcugucguaggaccccaggauggcccgcauaccgucccgcuccugcugguagucgguguccucgggccggaacuggcugcuaguggccucccagcucaggucgaaguggggcagccggugcaggaggcucacccaccagggcgccgcguagcugaccccggccauggcggggcccggccgccuccggaugcgcgcggccugcgcggggcucccuugcuggcccggggcgcgggcuucagggacccgucgacccccgccuggccgcccgcaucauccgcgcgcuccugggcccggcccggcccggcucggcccggcucggcugcgcucggcuccgcucggccgcccgcgcccg

SEQ ID NO: 2658 - RNA, 1079 nt, Homo sapiens
gguggaggagaggaggcggagggcugaccuuuugaucuugauaauccuauagcuuuccgcacagcuuguggcugagugcggcuuccuugaagaugaggcagucgccugggugcucggcguacagcgaggucagccgguacugguucuccguggugaugucgaucugguagccggugagcguguagcaggccuugcggaacuccuggaucuuggucuggaaaaccuccuugagccgcugguucuucagcucggcacucuccaccugcuucuucagcucugccaccuccuuggacgauggcagacucgcggcggcagccucaaggucggcugggacggugccuccucucuccauggcgcgcaggagcccgcgcagucgcucgcacuccgccugcagcuggcugugguccucgcgcaggcgcugccuggccacacuggugggguucaggcucaugugcagcacuuugguccugcucuggucauagucaccgcgguccuggaccccggccaccgugcgguuggcguggcggagcgaguagguggcccuauggaugccaucacuggucuccccguugccguagaaucccacugcgaugccggcgcugcacaccagcguggcgaugaugacacaccaggccgugcagcagcagucggcguccaggugcuccucgcucuugcgccgccggcagcacagccagaaggaguagaagagcaggaagaggagguccagggcgaggcaggccagggcggcggcccccaggagcagcagggccugcugguagucgguguccucgggccggaacuggcugcuaguggccucccagcucaggucgaaguggggcagccggugcaggaggcucacccaccagggcgccgcguagcugaccccggccauggcggggcccggccgccuccggaugcgcgcggccugcgcggggcucccuugcuggcccggggcgcgggcuucagggacccgucgacccccgccuggccgcccgcaucauccgcgcgcuccugggcccggcccggcccggcucggcccggcucggcugcgcucggcuccgcucggccgcccgcgcccg

SEQ ID NO: 2659-2662 - skipped (4 entries)

SEQ ID NO: 2663 - RNA, 1304 nt, Homo sapiens
uuaacucacauaaaguuuaaucaucaaguuaaugaaaauaucaaaauuuuugaguuaguguauggcagagaaaauuuaguugcaaauaauacaguuuuugguguuuccauuauugacaagcuaugcugcagaaagagcaaucgcauuaaaucuuaguucaucagggucgcgcuccauaaacuucuugcaaacuucuauggcauccucuaauaaaguuucaucacuaguuucaccaugguuaauuggaaauggcuuccgcccaucuaauucauagagaugcccaucuacaugaacuaaugcaauaaaaugaagaucuacuuucucaucuauacuuggugccucagucugaccuucaugggcacuggucucaugaguaacucggauggcaucauaguucuccagguaucuggcucguucuucagggcucauugacacagauuccuccaggaauuuuuucaagguugauccagauucaaagugcaucuugucuuuauuguuugcaauagcaugaaucaguccaauuguuccacaggcauugcugauuguuugcuucaugaaauauacugaugauguaacaucuugucccugagauuuuauuuuuucuuccucuucuguucugaauacuucauacuuuucuguaauaggaaagagaaguaagacugcacagacuggucuugguaccaugcuaaggaguucaggauccauuccauauacaucaacgaauugccaguuaggauguagaccuaauuguuuaagaaacaauccugcuauugguguagacagucuauugaucuucuuaaugacgccagguuuaagcuuauuaaucaaaucacacagcagaacaccauuuucuagagaggcucgaaaaucuuuuguuucaaaauucuucucuguuacugccuccacccaucucugagccucagcgaacgccacggagcaguuggccucugccuccuccagcccuuccauggcuaggacaagggagggagagagagacucgggaugcguggaggggagggguuguccccgcgcgucugggccccacgggcggggagggcacgcgggccucccacaacuccggcuuccgcuccggcugcgaaggcgccggggcucuaguucccuuuguugcgcucugcaguucguuaaggucucgaaccuacacgaacgugaagaccuggcuuucucuaaacuccugaaagcgacccaaggcccgcggggacccgggcagucaggcaggacgcgggaagcgaagcgggugcccagcggcagcgcgcggcaccagccccgacgacaguuuggacuuc

SEQ ID NO: 2664 - RNA, 1556 nt, Homo sapiens
uuaacucacauaaaguuuaaucaucaaguuaaugaaaauaucaaaauuuuugaguuaguguauggcagagaaaauuuaguugcaaauaauacaguuuuugguguuuccauuauugacaagcuaugcugcagaaagagcaaucgcauuaaaucuuaguucaucagggucgcgcuccauaaacuucuugcaaacuucuauggcauccucuaauaaaguuucaucacuaguuucaccaugguuaauuggaaauggcuuccgcccaucuaauucauagagaugcccaucuacaugaacuaaugcaauaaaaugaagaucuacuuucucaucuauacuuggugccucagucugaccuucaugggcacuggucucaugaguaacucggauggcaucauaguucuccagguaucuggcucguucuucagggcucauugacacagauuccuccaggaauuuuuucaagguugauccagauucaaagugcaucuugucuuuauuguuugcaauagcaugaaucaguccaauuguuccacaggcauugcugauuguuugcuucaugaaauauacugaugauguaacaucuugucccugagauuuuauuuuuucuuccucuucuguucugaauacuucauacuuuucuguaauaggaaagagaaguaagacugcacagacuggucuugguaccaugcuaaggaguucaggauccauuccauauacaucaacgaauugccaguuaggauguagaccuaauuguuuaagaaacuucgucagugcuuguccuaaaagauucucaaacgcuuucaaauuaagauggggaccauuauaguacggguugcuuugugcuuuucuucccagccaguacaauguuaucaaaacauuuuucacucuccugucagucucuucuugcuugacagugacucgauuugauaaauccuguagaucuccaggauggaaaagcugggcuucuuucaauccaaucuguucacaagcuuucaagaaaacguuuauauuauccaauccugcuauugguguagacagucuauugaucuucuuaaugacgccagguuuaagcuuauuaaucaaaucacacagcagaacaccauuuucuagagaggcucgaaaaucuuuuguuucaaaauucuucucuguuacugccuccacccaucucugagccucagcgaacgccacggagcaguuggccucugccuccuccagcccuuccauggcuaggacaagggagggagagagagacucgggaugcguggaggggagggguuguccccgcgcgucugggccccacgggcggggagggcacgcgggccucccacaacuccggcuuccgcuccggcugcgaaggcgccggggcucuaguucccuuuguugcgcucugcaguucguuaaggucucgaaccuacacgaacgugaagaccuggcuuucucuaaacuccugaaagcgacccaaggcccgcggggacccgggcagucaggcaggacgcgggaagcgaagcgggugcccagcggcagcgcgcggcaccagccccgacgacaguuuggacuuc

SEQ ID NO: 2665 - RNA, 2385 nt, Homo sapiens
uuaacucacauaaaguuuaaucaucaaguuaaugaaaauaucaaaauuuuugaguuaguguauggcagagaaaauuuaguugcaaauaauacaguuuuugguguuuccauuauugacaagcuaugcugcagaaagagcaaucgcauuaaaucuuaguucaucagggucgcgcuccauaaacuucuugcaaacuucuauggcauccucuaauaaaguuucaucacuaguuucaccaugguuaauuggaaauggcuuccgcccaucuaauucauagagaugcccaucuacaugaacuaaugcaauaaaaugaagaucuacuuucucaucuauacuuggugccucagucugaccuucaugggcacuggucucaugaguaacucggauggcaucauaguucuccagguaucuggcucguucuucagggcucauugacacagauuccuccaggaauuuuuucaagguugauccagauucaaagugcaucuugucuuuauuguuugcaauagcaugaaucaguccaauuguuccacaggcauugcugauuguuugcuucaugaaauauacugaugauguaacaucuugucccugagauuuuauuuuuucuuccucuucuguucugaauacuucauacuuuucuguaauaggaaagagaaguaagacugcacagacuggucuugguaccaugcuaaggaguucaggauccauuccauauacaucaacgaauugccaguuaggauguagaccuaauuguuuaagaaacaauccugcuauugguguagacagucuauugaucuucuuaaugacgccagguuuaagcuuauuaaucaaaucacacagcagaacaccauuuucuagagaggcucgaaaaucuuuuguuucaaaauucuucucuguuacugccuuaaugagaauaguccuuccugaauuuuguucaguccucaaaauuauaucuuuuuugcugcagacucugucccugagauacagccaacccacacagaugcagacaugagcacauaucaguugccuccaaauuuccagagcuccgagcucuguucucuggaagagaacaucauaggacauccaacuguaaaacgugaaaauauggcauauccuaauuuucuucauagcaguuguaauaaaaaaauuaaaauagcuuuagaccguacccauauauugaacuuauuugcacuugcccuaucacuguagcaccauauugaaauucaucaaaauucaaauagcuauaaaugaaacaugaaugguaauaauaacuuuagauguugaaauaauugcucagggugauuuagauucuauaaacauaguuaucaaaaagaaaaacagcauucuuugcccccaagaguaaaagauucacauaaaaauguuuuccucaugagcagugugcuuggguauaguauuauuacaggaaagauaaaaauuccaaucauccuugguaaauugcaugucugcuaacuucagcuauuuugggauuuuuaaaaguuaaaccauuuccgagucacagaagaaauaugcacaguuccccugugcauggaaacaaaaugcaaucuauucauuccaucuccuuauuuaaauucuuuagaaaauuaggugaaucugaugauuuaugaaacaaucuuugagacuacuuucacuauagcugauugcagucuuaggacgaugguaauaauagauaacauuugugacugcuggacuuuauguacuucauuuauaauucucauguaaaauguacaugagaauauuuuugcuuaagguauuaauuugccuaagacaacucagaguaagugccaagaauaaaaccaggucucacaccaaaguuugagcucuacccaugaagcaaugacuuuuacauaauuguuagagauccuaauaauguauuuuuuuuuguacagccacuauauuuuaugccauaaucucaauaucauauucucaaucaagcacugugagaacacagaaauucuauauuaccaagaccagaaguuucaaagugaagcaauuuucauaacgcagccacuuagugggaaagccacuuagugggaaagcuuaucaauuggauauuuggaaaauuauuuuucuuucuuaaaaaguuauaucagaugagaucuccaaacucaaugcaagagguguguauuucuccugcccaagauucacuuccccaacuggguucuagaaaaucacuauaagugugacccuggggccaacagccuuaagauuaucugagugcuuguuagaaaugcacaaucucagaccucaccuaccagcugaaucagaauuugcauuuuaacaagaccuggaaucucauaugcucauuaauguuugaaauguccugcuacccuaccccacccuagguuccuaauuauuccacuucuuucc

SEQ ID NO: 2666 - RNA, 743 nt, Homo sapiens
uuaacucacauaaaguuuaaucaucaaguuaaugaaaauaucaaaauuuuugaguuaguguauggcagagaaaauuuaguugcaaauaauacaguuuuugguguuuccauuauugacaagcuaugcugcagaaagagcaaucgcauuaaaucuuaguucaucagggucgcgcuccauaaacuucuugcaaacuucuauggcauccucuaauaaaguuucaucacuaguuucaccaugguuaauuggaaauggcuuccgcccaucuaauucauagagaugcccaucuacaugaacuaaugcaauaaaaugaagaucuacuuucucaucuauacuuggugccuccacccaucucugagccucagcgaacgccacggagcaguuggccucugccuccuccagcccuuccauggcuaggacaagggagggagagagagacucgggaugcguggaggggagggguuguccccgcgcgucugggccccacgggcggggagggcacgcgggccucccacaacuccggcuuccgcuccggcugcgaaggcgccggggcucuaguucccuuuguugcgcucugcaguucguuaaggucucgaaccuacacgaacgugaagaccuggcuuucucuaaacuccugaaagcgacccaaggcccgcggggacccgggcagucaggcaggacgcgggaagcgaagcgggugcccagcggcagcgcgcggcaccagccccgacgacaguuuggacuuc

SEQ ID NO: 2667 - RNA, 2244 nt, Homo sapiens
uuaacucacauaaaguuuaaucaucaaguuaaugaaaauaucaaaauuuuugaguuaguguauggcagagaaaauuuaguugcaaauaauacaguuuuugguguuuccauuauugacaagcuaugcugcagaaagagcaaucgcauuaaaucuuaguucaucagggucgcgcuccauaaacuucuugcaaacuucuauggcauccucuaauaaaguuucaucacuaguuucaccaugguuaauuggaaauggcuuccgcccaucuaauucauagagaugcccaucuacaugaacuaaugcaauaaaaugaagaucuacuuucucaucuauacuuggugccucagucugaccuucaugggcacuggucucaugaguaacucggauggcaucauaguucuccagguaucuggcucguucuucagggcucauugacacagauuccuccaggaauuuuuucaagguugauccagauucaaagugcaucuugucuuuauuguuugcaauagcaugaaucaguccaauuguuccacaggcauugcugauuguuugcuucaugaaauauacugaugauguaacaucuugucccugagauuuuauuuuuucuuccucuucuguucugaauacuucauacuuuucuguaauaggaaagagaaguaagacugcacagacuggucuugguaccaugcuaaggaguucaggauccauuccauauacaucaacgaauugccaguuaggauguagaccuaauuguuuaagaaacuuaaugagaauaguccuuccugaauuuuguucaguccucaaaauuauaucuuuuuugcugcagacucugucccugagauacagccaacccacacagaugcagacaugagcacauaucaguugccuccaaauuuccagagcuccgagcucuguucucuggaagagaacaucauaggacauccaacuguaaaacgugaaaauauggcauauccuaauuuucuucauagcaguuguaauaaaaaaauuaaaauagcuuuagaccguacccauauauugaacuuauuugcacuugcccuaucacuguagcaccauauugaaauucaucaaaauucaaauagcuauaaaugaaacaugaaugguaauaauaacuuuagauguugaaauaauugcucagggugauuuagauucuauaaacauaguuaucaaaaagaaaaacagcauucuuugcccccaagaguaaaagauucacauaaaaauguuuuccucaugagcagugugcuuggguauaguauuauuacaggaaagauaaaaauuccaaucauccuugguaaauugcaugucugcuaacuucagcuauuuugggauuuuuaaaaguuaaaccauuuccgagucacagaagaaauaugcacaguuccccugugcauggaaacaaaaugcaaucuauucauuccaucuccuuauuuaaauucuuuagaaaauuaggugaaucugaugauuuaugaaacaaucuuugagacuacuuucacuauagcugauugcagucuuaggacgaugguaauaauagauaacauuugugacugcuggacuuuauguacuucauuuauaauucucauguaaaauguacaugagaauauuuuugcuuaagguauuaauuugccuaagacaacucagaguaagugccaagaauaaaaccaggucucacaccaaaguuugagcucuacccaugaagcaaugacuuuuacauaauuguuagagauccuaauaauguauuuuuuuuuguacagccacuauauuuuaugccauaaucucaauaucauauucucaaucaagcacugugagaacacagaaauucuauauuaccaagaccagaaguuucaaagugaagcaauuuucauaacgcagccacuuagugggaaagccacuuagugggaaagcuuaucaauuggauauuuggaaaauuauuuuucuuucuuaaaaaguuauaucagaugagaucuccaaacucaaugcaagagguguguauuucuccugcccaagauucacuuccccaacuggguucuagaaaaucacuauaagugugacccuggggccaacagccuuaagauuaucugagugcuuguuagaaaugcacaaucucagaccucaccuaccagcugaaucagaauuugcauuuuaacaagaccuggaaucucauaugcucauuaauguuugaaauguccugcuacccuaccccacccuagguuccuaauuauuccacuucuuucc

SEQ ID NO: 2668 - RNA, 1123 nt, Homo sapiens
uuaacucacauaaaguuuaaucaucaaguuaaugaaaauaucaaaauuuuugaguuaguguauggcagagaaaauuuaguugcaaauaauacaguuuuugguguuuccauuauugacaagcuaugcugcagaaagagcaaucgcauuaaaucuuaguucaucagggucgcgcuccauaaacuucuugcaaacuucuauggcauccucuaauaaaguuucaucacuaguuucaccaugguuaauuggaaauggcuuccgcccaucuaauucauagagaugcccaucuacaugaacuaaugcaauaaaaugaagaucuacuuucucaucuauacuuggugccucagucugaccuucaugggcacuggucucaugaguaacucggauggcaucauaguucuccagguaucuggcucguucuucagggcucauugacacagauuccuccaggaauuuuuucaagguugauccagauucaaagugcaucuugucuuuauuguuugcaauagcaugaaucaguccaauuguuccacaggcauugcugauuguuugcuucaugaaauauacugaugauguaacaucuugucccugagauuuuauuuuuucuuccucuucuguucugaauacuucauacuuuucuguaauaggaaagagaaguaagacugcacagacuggucuugguaccaugcuaaggaguucaggauccauuccauauacaucaacgaauugccaguuaggauguagaccuaauuguuuaagaaacuucgucagugcuuguccuaaaagauucucaaacgcuuucaaauuaagauggggaccauuauaguacggguugcuuugugcuuuucuucccagccaguacaauguuaucaaaacauuuuucacucuccugucagucucuucuugcuugacagugacucgauuugauaaauccuguagaucuccaggauggaaaagcugggcuucuuucaauccaaucuguucacaagcuuucaagaaaacguuuauauuaucagucagcaaaagaggcagcagcaagacccaugcauauguauauuugaaaaaaaauacauagggcuuguacagccuuucaguccuccagagcauacacagucgugcuaucuua

SEQ ID NO: 2669 - RNA, 2637 nt, Homo sapiens
uuaacucacauaaaguuuaaucaucaaguuaaugaaaauaucaaaauuuuugaguuaguguauggcagagaaaauuuaguugcaaauaauacaguuuuugguguuuccauuauugacaagcuaugcugcagaaagagcaaucgcauuaaaucuuaguucaucagggucgcgcuccauaaacuucuugcaaacuucuauggcauccucuaauaaaguuucaucacuaguuucaccaugguuaauuggaaauggcuuccgcccaucuaauucauagagaugcccaucuacaugaacuaaugcaauaaaaugaagaucuacuuucucaucuauacuuggugccucagucugaccuucaugggcacuggucucaugaguaacucggauggcaucauaguucuccagguaucuggcucguucuucagggcucauugacacagauuccuccaggaauuuuuucaagguugauccagauucaaagugcaucuugucuuuauuguuugcaauagcaugaaucaguccaauuguuccacaggcauugcugauuguuugcuucaugaaauauacugaugauguaacaucuugucccugagauuuuauuuuuucuuccucuucuguucugaauacuucauacuuuucuguaauaggaaagagaaguaagacugcacagacuggucuugguaccaugcuaaggaguucaggauccauuccauauacaucaacgaauugccaguuaggauguagaccuaauuguuuaagaaacuucgucagugcuuguccuaaaagauucucaaacgcuuucaaauuaagauggggaccauuauaguacggguugcuuugugcuuuucuucccagccaguacaauguuaucaaaacauuuuucacucuccugucagucucuucuugcuugacagugacucgauuugauaaauccuguagaucuccaggauggaaaagcugggcuucuuucaauccaaucuguucacaagcuuucaagaaaacguuuauauuauccaauccugcuauugguguagacagucuauugaucuucuuaaugacgccagguuuaagcuuauuaaucaaaucacacagcagaacaccauuuucuagagaggcucgaaaaucuuuuguuucaaaauucuucucuguuacugccuuaaugagaauaguccuuccugaauuuuguucaguccucaaaauuauaucuuuuuugcugcagacucugucccugagauacagccaacccacacagaugcagacaugagcacauaucaguugccuccaaauuuccagagcuccgagcucuguucucuggaagagaacaucauaggacauccaacuguaaaacgugaaaauauggcauauccuaauuuucuucauagcaguuguaauaaaaaaauuaaaauagcuuuagaccguacccauauauugaacuuauuugcacuugcccuaucacuguagcaccauauugaaauucaucaaaauucaaauagcuauaaaugaaacaugaaugguaauaauaacuuuagauguugaaauaauugcucagggugauuuagauucuauaaacauaguuaucaaaaagaaaaacagcauucuuugcccccaagaguaaaagauucacauaaaaauguuuuccucaugagcagugugcuuggguauaguauuauuacaggaaagauaaaaauuccaaucauccuugguaaauugcaugucugcuaacuucagcuauuuugggauuuuuaaaaguuaaaccauuuccgagucacagaagaaauaugcacaguuccccugugcauggaaacaaaaugcaaucuauucauuccaucuccuuauuuaaauucuuuagaaaauuaggugaaucugaugauuuaugaaacaaucuuugagacuacuuucacuauagcugauugcagucuuaggacgaugguaauaauagauaacauuugugacugcuggacuuuauguacuucauuuauaauucucauguaaaauguacaugagaauauuuuugcuuaagguauuaauuugccuaagacaacucagaguaagugccaagaauaaaaccaggucucacaccaaaguuugagcucuacccaugaagcaaugacuuuuacauaauuguuagagauccuaauaauguauuuuuuuuuguacagccacuauauuuuaugccauaaucucaauaucauauucucaaucaagcacugugagaacacagaaauucuauauuaccaagaccagaaguuucaaagugaagcaauuuucauaacgcagccacuuagugggaaagccacuuagugggaaagcuuaucaauuggauauuuggaaaauuauuuuucuuucuuaaaaaguuauaucagaugagaucuccaaacucaaugcaagagguguguauuucuccugcccaagauucacuuccccaacuggguucuagaaaaucacuauaagugugacccuggggccaacagccuuaagauuaucugagugcuuguuagaaaugcacaaucucagaccucaccuaccagcugaaucagaauuugcauuuuaacaagaccuggaaucucauaugcucauuaauguuugaaauguccugcuacccuaccccacccuagguuccuaauuauuccacuucuuucc

SEQ ID NO: 2670 - RNA, 1163 nt, Homo sapiens
uuaacucacauaaaguuuaaucaucaaguuaaugaaaauaucaaaauuuuugaguuaguguauggcagagaaaauuuaguugcaaauaauacaguuuuugguguuuccauuauugacaagcuaugcugcagaaagagcaaucgcauuaaaucuuaguucaucagggucgcgcuccauaaacuucuugcaaacuucuauggcauccucuaauaaaguuucaucacuaguuucaccaugguuaauuggaaauggcuuccgcccaucuaauucauagagaugcccaucuacaugaacuaaugcaauaaaaugaagaucuacuuucucaucuauacuuggugccucagucugaccuucaugggcacuggucucaugaguaacucggauggcaucauaguucuccagguaucuggcucguucuucagggcucauugacacagauuccuccaggaauuuuuucaagguugauccagauucaaagugcaucuugucuuuauuguuugcaauagcaugaaucaguccaauuguuccacaggcauugcugauuguuugcuucaugaaauauacugaugauguaacaucuugucccugagauuuuauuuuuucuuccucuucuguucugaauacuucauacuuuucuguaauaggaaagagaaguaagacugcacagacuggucuugguaccaugcuaaggaguucaggauccauuccauauacaucaacgaauugccaguuaggauguagaccuaauuguuuaagaaacuccacccaucucugagccucagcgaacgccacggagcaguuggccucugccuccuccagcccuuccauggcuaggacaagggagggagagagagacucgggaugcguggaggggagggguuguccccgcgcgucugggccccacgggcggggagggcacgcgggccucccacaacuccggcuuccgcuccggcugcgaaggcgccggggcucuaguucccuuuguugcgcucugcaguucguuaaggucucgaaccuacacgaacgugaagaccuggcuuucucuaaacuccugaaagcgacccaaggcccgcggggacccgggcagucaggcaggacgcgggaagcgaagcgggugcccagcggcagcgcgcggcaccagccccgacgacaguuuggacuuc

SEQ ID NO: 2671 - RNA, 436 nt, Homo sapiens
ucaaacaugauaggauagaaucuuccuuaccacauaggagaauguacuguauuguguugucccguggccauuugaaauaauuauggacauauugaaaugcuuauucauggcaggaccaacugugcauuucaauguauucaucgugcucucacuuaaagucaaggugcagcucucauuuccaaggagaacucuaguuuucuuuaaaucaaauuuauuauuccuccgaaauccaaagucccagccacauauggucagccuugucccuccuucaaggggugcacuauuugggaaaaccuucucuucaucagacaacugcuccuccagauccgccaucuuccuucuggcgacaaaccgcggcggcggcggcggcagcggccaccugacuuccccguuuccgugcgguccucagcgccgcgcgcccccgcuaagggagggg

SEQ ID NO: 2672 - RNA, 312 nt, Homo sapiens
gauccuuacguauucaucgugcucucacuuaaagucaaggugcagcucucauuuccaaggagaacucuaguuuucuuuaaaucaaauuuauuauuccuccgaaauccaaagucccagccacauauggucagccuugucccuccuucaaggggugcacuauuugggaaaaccuucucuucaucagacaacugcuccuccagauccgccaucuuccuucuggcgacaaaccgcggcggcggcggcggcagcggccaccugacuuccccguuuccgugcgguccucagcgccgcgcgcccccgcuaagggagggg

SEQ ID NO: 2673 - RNA, 3613 nt, Homo sapiens
uacaagauguugcaucacuuuacuuuaauugcaugauuuaucagaacaacuauuaacauacgaaguaccauucaguucagcugcagguauaggcagugacaaguaucuaauucuuagaagaaucacuuacucccacaaucuguccagacacauuaaucuaaggacaaguuuauaaauagcaaacgugauuuucacauugcaguguucucaagaauguauauacaaguguguaguccuguugaugggauguuuccccgaguucuuucuauugaugcguucaugcucuugacccugguagagacaguucuuucuuuccacagagcagauuuucuuuugucauccaccauuuacaauacucugugaauuaguauuacuuauuacauuuaugaaacggcaauauuuggauuguaauagcucuucaguacaauuccuugugucuucugguaagucucugcacuaucagagagcuuuuaguuauaaucauuuuccugcaacaacagccaaacucaacuauugaguuucagugugacacacccucuuuguagcuugcuggguuaacccuuggcuucaaguccugaugauguaaugagggugggguguauuggcaaucaguacauuuccuuaucgcaauuuacagucauugaaaaucaugcugucauuaaucccagucugacauaccuuuucuaaaauguucacagugcaguguuuuuguggccuaacaaaauuuuucucauaucauuaaaaauaaacauuuuuauaaaaaauauaacacuuuaaauguuuacgucgacaaaaccaguuagaguaaccuacaccacaugcacuauacaguagcaagcacaaaauuccacagaaugaagcaucacaaaguucugcucaggguggcuauuccaucuaggugaaauagcugggauuuucaauugccuuuuucauuuguuucuaaaguauguuuugcuuaacauaaaacacacccuaaugcaaaauaaaacuccccaaaaguuuuguuuccaauugcuugcgaggugggaaccugccaccgagacagaggcuaaucuuuucaauccauccacccuuucuuugcucuaccuaugagcugugauuggaaccaaugaaccuuuuaguaaaauguauccugcuuuacaaacaugcugaguuaucuuuaaaaauauuuaucaacaaauuacuugucuuauuuugaguuuucauuuaaaaaaauacacacaaaacaucuacauguucacauucauuagaucagaguagcaucauucucaaacaguggguuuuuauaugacaacuaaauauuucaugaugacuaaauuauuucauacaaauuuucuuaaugucaucuauguacauuacauccuguucauuuauaaacauguuuugugugaugcuauuuugaaacuuugacuguauugccuauaaauauucuuccaaccaaaggaaugucuauacaaaaauuuauaagggcugggcgcaguggcucaugccuguaauccuagcacuuugggaggcugagguggguggauuucuugaguccaggaguuugaaaccagccuuggcaacauggcaaaaccccgucucuacaaaaaauacaaaaauuagccggggaugguggugugcgccuguagucccagcuauucgggaggcuugagccugggagguggagguugcagugagcuaugaucacaccacugcacuacagcccuggcaacagagugagauccugucucaaaaaacaaacaaacauuuaaaagggaauguuuaccuaaugggugaaugacaccaucaguaaugaaaaauguuauugaccauacaacacacaaaaguguuuugaaacacuagaauucuaaaugaguggccuguucuggggcugccgcuccuguccugagcauuacuaucucuucugaguuuucugugaucaagaagcccucaauauuuccugcuucaauuucccauaugaaaucaagugguaccugauuuuuaaaaaauucaacccagaauucaaguuuuggacuccaauaugacaggaguguugucacggcugcaggccauugguccguggccugugggaccaagccucugguucugaugcucugucagauaagaaauuccuuagaauccaguaauuuaaauaacaauacaaguccuauaauagugcaauuuuggcaagagcaaagaauaucgauggccuuuuaaaggucaggcagugaaaaaaccauuggacaaaguguggacuguugcuuugacauaguacuagcacuaugaugucucccagaaggaggcuggucguguguccaccucaucaucagcguuaucuucugaugacaacagagaaggauacggagcgacacauuuuacguucacauaaguagcguucacauggacauagugcuccccaaugaaaguagagaagaucgcugauauccgggacaccaguucagaaaaggaugggcgcauuucggcuuuagggugccagcauuuuagcauuacuucauauaaggggucugggcaguauucggguuguaggagucuucucccuugcaacaaguaaacaguuauaucaaagguguuuacgucaggauaagguggggcuccucuugucaucagcucccagaggagcacgccaaaggaccacacaucugacuuggugguaaacuuuugaguuugcagacuuuccaaagccauccacuucacuggcagcuuugcaccuguuuuguuguguacacuauaguauucuuuaucauacaugucucuggcaagaccaaaaucagcaaccuugacugugaauuuuucauccagcauacaguuucuugcagccaagucucuguggacaaacuuuuugcuugcaagauauuucaugccuuuggcuacuugaagaccaaagccaauaagaucuuuuacaguuggauuaugagucucauuucgaaugaaauuucgaagaucuccauguuucauguaugguaggaccaccagcggagacccuucacuucgcaggcagauucccaggagcgagaggacauugggaugacuaaaaucuuucaugaugauucccucggucagaaauugggaaacuucuccuaugucagugauucuguucaaggauuucacagcacagugaauuuucuugccaucauuguccaacaaagucccaugauauacacaaccaaaaugcccucuuccuaugacuucauugaaaugcacaaucaggcuacugggcccaaucacuacaugcugcacugccuggaccagcucuggauuuagagcacugaggucaauguggacaguauuuugcaguaauggacuggauauaucagaguccccacuaguuaggaugggggacaugucugucagaggauacugcacuugucggcaugaaccguucugagaugaauuaggaaacugaucauugaaaaccucauuaaauucuccaggaggggcaugaaugaugaauuuugcugcuauacgcaccuucucuucaucagacaacugcuccuccagauccgccaucuuccuucuggcgacaaaccgcggcggcggcggcggcagcggccaccugacuuccccguuuccgugcgguccucagcgccgcgcgcccccgcuaagggagggg

SEQ ID NO: 2674 - RNA, 407 nt, Homo sapiens
gaguugaugagccaaaacccacacauaaaugagcuuuaaugauuuauuuuaagccugagaauaacauaauuacacuggcuuccuuauuuacaucaugagaggaaugcaggaaucccaccucuauauuuagcucgcuguucaauuucagcaggucauuggggaccgugcauaaaacggcuucagaauguaaguguauauucucacagcucuuauuuccaacuuuuaacacuucaccuuuaacugcuucagggucaauaucauuucccuucucuucaucagacaacugcuccuccagauccgccaucuuccuucuggcgacaaaccgcggcggcggcggcggcagcggccaccugacuuccccguuuccgugcgguccucagcgccgcgcgcccccgcuaagggagggg

SEQ ID NO: 2675 - RNA, 4876 nt, Homo sapiens
uacaagauguugcaucacuuuacuuuaauugcaugauuuaucagaacaacuauuaacauacgaaguaccauucaguucagcugcagguauaggcagugacaaguaucuaauucuuagaagaaucacuuacucccacaaucuguccagacacauuaaucuaaggacaaguuuauaaauagcaaacgugauuuucacauugcaguguucucaagaauguauauacaaguguguaguccuguugaugggauguuuccccgaguucuuucuauugaugcguucaugcucuugacccugguagagacaguucuuucuuuccacagagcagauuuucuuuugucauccaccauuuacaauacucugugaauuaguauuacuuauuacauuuaugaaacggcaauauuuggauuguaauagcucuucaguacaauuccuugugucuucugguaagucucugcacuaucagagagcuuuuaguuauaaucauuuuccugcaacaacagccaaacucaacuauugaguuucagugugacacacccucuuuguagcuugcuggguuaacccuuggcuucaaguccugaugauguaaugagggugggguguauuggcaaucaguacauuuccuuaucgcaauuuacagucauugaaaaucaugcugucauuaaucccagucugacauaccuuuucuaaaauguucacagugcaguguuuuuguggccuaacaaaauuuuucucauaucauuaaaaauaaacauuuuuauaaaaaauauaacacuuuaaauguuuacgucgacaaaaccaguuagaguaaccuacaccacaugcacuauacaguagcaagcacaaaauuccacagaaugaagcaucacaaaguucugcucaggguggcuauuccaucuaggugaaauagcugggauuuucaauugccuuuuucauuuguuucuaaaguauguuuugcuuaacauaaaacacacccuaaugcaaaauaaaacuccccaaaaguuuuguuuccaauugcuugcgaggugggaaccugccaccgagacagaggcuaaucuuuucaauccauccacccuuucuuugcucuaccuaugagcugugauuggaaccaaugaaccuuuuaguaaaauguauccugcuuuacaaacaugcugaguuaucuuuaaaaauauuuaucaacaaauuacuugucuuauuuugaguuuucauuuaaaaaaauacacacaaaacaucuacauguucacauucauuagaucagaguagcaucauucucaaacaguggguuuuuauaugacaacuaaauauuucaugaugacuaaauuauuucauacaaauuuucuuaaugucaucuauguacauuacauccuguucauuuauaaacauguuuugugugaugcuauuuugaaacuuugacuguauugccuauaaauauucuuccaaccaaaggaaugucuauacaaaaauuuauaagggcugggcgcaguggcucaugccuguaauccuagcacuuugggaggcugagguggguggauuucuugaguccaggaguuugaaaccagccuuggcaacauggcaaaaccccgucucuacaaaaaauacaaaaauuagccggggaugguggugugcgccuguagucccagcuauucgggaggcuugagccugggagguggagguugcagugagcuaugaucacaccacugcacuacagcccuggcaacagagugagauccugucucaaaaaacaaacaaacauuuaaaagggaauguuuaccuaaugggugaaugacaccaucaguaaugaaaaauguuauugaccauacaacacacaaaaguguuuugaaacacuagaauucuaaaugaguggccuguucuggggcugccgcuccuguccugagcauuacuaucucuucugaguuuucugugaucaagaagcccucaauauuuccugcuucaauuucccauaugaaaucaagugguaccugauuuuuaaaaaauucaacccagaauucaaguuuuggacuccaauaugacaggaguguugucacggcugcaggccauugguccguggccugugggaccaagccucugguucugaugcucugucagauaagaaauuccuuagaauccaguaauuuaaauaacaauacaaguccuauaauagugcaauuuuggcaagagcaaagaauaucgauggccuuuuaaaggucaggcagugaaaaaaccauuggacaaaguguggacuguugcuuugacauaguacuagcacuaugaugucucccagaaggaggcuggucguguguccaccucaucaucagcguuaucuucugaugacaacagagaaggauacggagcgacacauuuuacguucacauaaguagcguucacauggacauagugcuccccaaugaaaguagagaagaucgcugauauccgggacaccaguucagaaaaggaugggcgcauuucggcuuuagggugccagcauuuuagcauuacuucauauaaggggucugggcaguauucggguuguaggagucuucucccuugcaacaaguaaacaguuauaucaaagguguuuacgucaggauaagguggggcuccucuugucaucagcucccagaggagcacgccaaaggaccacacaucugacuuggugguaaacuuuugaguuugcagacuuuccaaagccauccacuucacuggcagcuuugcaccuguuuuguuguguacacuauaguauucuuuaucauacaugucucuggcaagaccaaaaucagcaaccuugacugugaauuuuucauccagcauacaguuucuugcagccaagucucuguggacaaacuuuuugcuugcaagauauuucaugccuuuggcuacuugaagaccaaagccaauaagaucuuuuacaguuggauuaugagucucauuucgaaugaaauuucgaagaucuccauguuucauguaugguaggaccaccagcggagacccuucacuucgcaggcagauucccaggagcgagaggacauugggaugacuaaaaucuuucaugaugauucccucggucagaaauugggaaacuucuccuaugucagugauucuguucaaggauuucacagcacagugaauuuucuugccaucauuguccaacaaagucccaugauauacacaaccaaaaugcccucuuccuaugacuucauugaaaugcacaaucaggcuacugggcccaaucacuacaugcugcacugccuggaccagcucuggauuuagagcacugaggucaauguggacaguauuuugcaguaauggacuggauauaucagaguccccacuaguuaggaugggggacaugucugucagaggauacugcacuugucggcaugaaccguucugagaugaauuaggaaacugaucuucuggaaaaguagcucgguagucuacagauucauuugaaaccauuucuguaguugggcuuacacuucgggcacuuacaagccuauccaaaugaggaguguguacucuugcaucguagcgaacuaauucacugcccagaucuuuaauuugcuuucucuuuuucagccacaggaaaaacccaaguaguaauaacagugcuguugauauugagacaacaccagcaaucaauccugugaaauucugaucugguugaacuauuacuuuuccaaggacgguugaagaaauugcuugcuuccacucuauauuuagcucgcuguucaauuucagcaggucauuggggaccgugcauaaaacggcuucagaauguaaguguauauucucacagcucuuauuuccaacuuuuaacacuucaccuuuaacugcuucagggucaauaucauuucccuuaauuuccaguacauuuucauugcccauugagaucaucacuggcuuuucaaaaggcuuaaacacaggauuauguacauaaaugagaucaaaguauuuggaaaggaucccaucuaacaugaaaaaggcuuugguuuucagggggaguugcagauucagcuguugcagggaaggagugguacaacagauuaucucugaauuagagcgauguugacaugccacuguaaaguuccuuccugcuucaugcacauuuaugaccauucucgggacacuaacugaauucagguuuuucccaacaccuguuauugugcucccaccacuaauaaaagauuugguuggaugaauuucauagacaaugggaucuucacgguaacugaagaugcuugucucucgguuggcuaagucaauuuucaauuuaacagcaaacucaguugaaaugguuugggcugggguauaacauucaagaauacuguuugacacacuuuuuaaaguacauguuuuuccaccaauugaaaugugucuagaauucccacuguuuagguaauuuccaguuaaaguaaguaaagugccaccagccauaggaccguauuucggcgaaauacuuguuauuacaggauccacauaggagaauguacuguauuguguugucccguggccauuugaaauaauuauggacauauugaaaugcuuauucauggcaggaccaacugugcauuucaauguauucaucgugcucucacuuaaagucaaggugcagcucucauuuccaaggagaacucuaguuuucuuuaaaucaaauuuauuauuccuccgaaauccaaagucccagccacauauggucagccuugucccuccuucaaggggugcacuauuugggaaaaccuucucuucaucagacaacugcuccuccagauccgccaucuuccuucuggcgacaaaccgcggcggcggcggcggcagcggccaccugacuuccccguuuccgugcgguccucagcgccgcgcgcccccgcuaagggagggg

SEQ ID NO: 2676 - RNA, 4930 nt, Homo sapiens
uacaagauguugcaucacuuuacuuuaauugcaugauuuaucagaacaacuauuaacauacgaaguaccauucaguucagcugcagguauaggcagugacaaguaucuaauucuuagaagaaucacuuacucccacaaucuguccagacacauuaaucuaaggacaaguuuauaaauagcaaacgugauuuucacauugcaguguucucaagaauguauauacaaguguguaguccuguugaugggauguuuccccgaguucuuucuauugaugcguucaugcucuugacccugguagagacaguucuuucuuuccacagagcagauuuucuuuugucauccaccauuuacaauacucugugaauuaguauuacuuauuacauuuaugaaacggcaauauuuggauuguaauagcucuucaguacaauuccuugugucuucugguaagucucugcacuaucagagagcuuuuaguuauaaucauuuuccugcaacaacagccaaacucaacuauugaguuucagugugacacacccucuuuguagcuugcuggguuaacccuuggcuucaaguccugaugauguaaugagggugggguguauuggcaaucaguacauuuccuuaucgcaauuuacagucauugaaaaucaugcugucauuaaucccagucugacauaccuuuucuaaaauguucacagugcaguguuuuuguggccuaacaaaauuuuucucauaucauuaaaaauaaacauuuuuauaaaaaauauaacacuuuaaauguuuacgucgacaaaaccaguuagaguaaccuacaccacaugcacuauacaguagcaagcacaaaauuccacagaaugaagcaucacaaaguucugcucaggguggcuauuccaucuaggugaaauagcugggauuuucaauugccuuuuucauuuguuucuaaaguauguuuugcuuaacauaaaacacacccuaaugcaaaauaaaacuccccaaaaguuuuguuuccaauugcuugcgaggugggaaccugccaccgagacagaggcuaaucuuuucaauccauccacccuuucuuugcucuaccuaugagcugugauuggaaccaaugaaccuuuuaguaaaauguauccugcuuuacaaacaugcugaguuaucuuuaaaaauauuuaucaacaaauuacuugucuuauuuugaguuuucauuuaaaaaaauacacacaaaacaucuacauguucacauucauuagaucagaguagcaucauucucaaacaguggguuuuuauaugacaacuaaauauuucaugaugacuaaauuauuucauacaaauuuucuuaaugucaucuauguacauuacauccuguucauuuauaaacauguuuugugugaugcuauuuugaaacuuugacuguauugccuauaaauauucuuccaaccaaaggaaugucuauacaaaaauuuauaagggcugggcgcaguggcucaugccuguaauccuagcacuuugggaggcugagguggguggauuucuugaguccaggaguuugaaaccagccuuggcaacauggcaaaaccccgucucuacaaaaaauacaaaaauuagccggggaugguggugugcgccuguagucccagcuauucgggaggcuugagccugggagguggagguugcagugagcuaugaucacaccacugcacuacagcccuggcaacagagugagauccugucucaaaaaacaaacaaacauuuaaaagggaauguuuaccuaaugggugaaugacaccaucaguaaugaaaaauguuauugaccauacaacacacaaaaguguuuugaaacacuagaauucuaaaugaguggccuguucuggggcugccgcuccuguccugagcauuacuaucucuucugaguuuucugugaucaagaagcccucaauauuuccugcuucaauuucccauaugaaaucaagugguaccugauuuuuaaaaaauucaacccagaauucaaguuuuggacuccaauaugacaggaguguugucacggcugcaggccauugguccguggccugugggaccaagccucugguucugaugcucugucagauaagaaauuccuuagaauccaguaauuuaaauaacaauacaaguccuauaauagugcaauuuuggcaagagcaaagaauaucgauggccuuuuaaaggucaggcagugaaaaaaccauuggacaaaguguggacuguugcuuugacauaguacuagcacuaugaugucucccagaaggaggcuggucguguguccaccucaucaucagcguuaucuucugaugacaacagagaaggauacggagcgacacauuuuacguucacauaaguagcguucacauggacauagugcuccccaaugaaaguagagaagaucgcugauauccgggacaccaguucagaaaaggaugggcgcauuucggcuuuagggugccagcauuuuagcauuacuucauauaaggggucugggcaguauucggguuguaggagucuucucccuugcaacaaguaaacaguuauaucaaagguguuuacgucaggauaagguggggcuccucuugucaucagcucccagaggagcacgccaaaggaccacacaucugacuuggugguaaacuuuugaguuugcagacuuuccaaagccauccacuucacuggcagcuuugcaccuguuuuguuguguacacuauaguauucuuuaucauacaugucucuggcaagaccaaaaucagcaaccuugacugugaauuuuucauccagcauacaguuucuugcagccaagucucuguggacaaacuuuuugcuugcaagauauuucaugccuuuggcuacuugaagaccaaagccaauaagaucuuuuacaguuggauuaugagucucauuucgaaugaaauuucgaagaucuccauguuucauguaugguaggaccaccagcggagacccuucacuucgcaggcagauucccaggagcgagaggacauugggaugacuaaaaucuuucaugaugauucccucggucagaaauugggaaacuucuccuaugucagugauucuguucaaggauuucacagcacagugaauuuucuugccaucauuguccaacaaagucccaugauauacacaaccaaaaugcccucuuccuaugacuucauugaaaugcacaaucaggcuacugggcccaaucacuacaugcugcacugccuggaccagcucuggauuuagagcacugaggucaauguggacaguauuuugcaguaauggacuggauauaucagaguccccacuaguuaggaugggggacaugucugucagaggauacugcacuugucggcaugaaccguucugagaugaauuaggaaacugaucuucuggaaaaguagcucgguagucuacagauucauuugaaaccauuucuguaguugggcuuacacuucgggcacuuacaagccuauccaaaugaggaguguguacucuugcaucguagcgaacuaauucacugcccagaucuuuaauuugcuuucucuuuuucagccacaggaaaaacccaaguaguaauaacagugcuguugauauugagacaacaccagcaaucaauccugugaaauucugaucugguugaacuauuacuuuuccaaggacgguugaagaaauugcuugcuuccacucuauauuuagcucgcuguucaauuucagcaggucauuggggaccgugcauaaaacggcuucagaauguaaguguauauucucacagcucuuauuuccaacuuuuaacacuucaccuuuaacugcuucagggucaauaucauuucccuuaauuuccaguacauuuucauugcccauugagaucaucacuggcuuuucaaaaggcuuaaacacaggauuauguacauaaaugagaucaaaguauuuggaaaggaucccaucuaacaugaaaaaggcuuugguuuucagggggaguugcagauucagcuguugcagggaaggagugguacaacagauuaucucugaauuagagcgauguugacaugccacuguaaaguuccuuccugcuucaugcacauuuaugaccauucucgggacacuaacugaauucagguuuuucccaacaccuguuauugugcucccaccacuggcaaagcaaaauagaaaacugacaauguugagagguucuuuccaccaaguacuaauaaaagauuugguuggaugaauuucauagacaaugggaucuucacgguaacugaagaugcuugucucucgguuggcuaagucaauuuucaauuuaacagcaaacucaguugaaaugguuugggcugggguauaacauucaagaauacuguuugacacacuuuuuaaaguacauguuuuuccaccaauugaaaugugucuagaauucccacuguuuagguaauuuccaguuaaaguaaguaaagugccaccagccauaggaccguauuucggcgaaauacuuguuauuacaggauccacauaggagaauguacuguauuguguugucccguggccauuugaaauaauuauggacauauugaaaugcuuauucauggcaggaccaacugugcauuucaauguauucaucgugcucucacuuaaagucaaggugcagcucucauuuccaaggagaacucuaguuuucuuuaaaucaaauuuauuauuccuccgaaauccaaagucccagccacauauggucagccuugucccuccuucaaggggugcacuauuugggaaaaccuucucuucaucagacaacugcuccuccagauccgccaucuuccuucuggcgacaaaccgcggcggcggcggcggcagcggccaccugacuuccccguuuccgugcgguccucagcgccgcgcgcccccgcuaagggagggg

SEQ ID NO: 2677 - RNA, 601 nt, Homo sapiens
uuaagguacagauauuaauucaaauugacagaugcaacaaaaaauaaauuuacaacaccuuuuuaaaguacauguuuuuccaccaauugaaaugugucuagaauucccacuguuuagguaauuuccaguuaaaguaaguaaagugccaccagccauaggaccguauuucggcgaaauacuuguuauuacaggauccacauaggagaauguacuguauuguguugucccguggccauuugaaauaauuauggacauauugaaaugcuuauucauggcaggaccaacugugcauuucaauguauucaucgugcucucacuuaaagucaaggugcagcucucauuuccaaggagaacucuaguuuucuuuaaaucaaauuuauuauuccuccgaaauccaaagucccagccacauauggucagccuugucccuccuucaaggggugcacuauuugggaaaaccuucucuucaucagacaacugcuccuccagauccgccaucuuccuucuggcgacaaaccgcggcggcggcggcggcagcggccaccugacuuccccguuuccgugcgguccucagcgccgcgcgcccccgcuaagggagggg

SEQ ID NO: 2678 - RNA, 924 nt, Homo sapiens
cuuaauuuccaguacauuuucauugcccauugagaucaucacuggcuuuucaaaaggcuuaaacacaggauuauguacauaaaugagaucaaaguauuuggaaaggaucccaucuaacaugaaaaaggcuuugguuuucagggggaguugcagauucagcuguugcagggaaggagugguacaacagauuaucucugaauuagagcgauguugacaugccuaauaaaagauuugguuggaugaauuucauagacaaugggaucuucacgguaacugaagaugcuugucucucgguuggcuaagucaauuuucaauuuaacagcaaacucaguugaaaugguuugggcugggguauaacauucaagaauacuguuugacacacuuuuuaaaguacauguuuuuccaccaauugaaaugugucuagaauucccacuguuuagguaauuuccaguuaaaguaaguaaagugccaccagccauaggaccguauuucggcgaaauacuuguuauuacaggauccacauaggagaauguacuguauuguguugucccguggccauuugaaauaauuauggacauauugaaaugcuuauucauggcaggaccaacugugcauuucaauguauucaucgugcucucacuuaaagucaaggugcagcucucauuuccaaggagaacucuaguuuucuuuaaaucaaauuuauuauuccuccgaaauccaaagucccagccacauauggucagccuugucccuccuucaaggggugcacuauuugggaaaaccuucucuucaucagacaacugcuccuccagauccgccaucuuccuucuggcgacaaaccgcggcggcggcggcggcagcggccaccugacuuccccguuuccgugcgguccucagcgccgcgcgcccccgcuaagggagggg

SEQ ID NO: 2679 - RNA, 4540 nt, Homo sapiens
uacaagauguugcaucacuuuacuuuaauugcaugauuuaucagaacaacuauuaacauacgaaguaccauucaguucagcugcagguauaggcagugacaaguaucuaauucuuagaagaaucacuuacucccacaaucuguccagacacauuaaucuaaggacaaguuuauaaauagcaaacgugauuuucacauugcaguguucucaagaauguauauacaaguguguaguccuguugaugggauguuuccccgaguucuuucuauugaugcguucaugcucuugacccugguagagacaguucuuucuuuccacagagcagauuuucuuuugucauccaccauuuacaauacucugugaauuaguauuacuuauuacauuuaugaaacggcaauauuuggauuguaauagcucuucaguacaauuccuugugucuucugguaagucucugcacuaucagagagcuuuuaguuauaaucauuuuccugcaacaacagccaaacucaacuauugaguuucagugugacacacccucuuuguagcuugcuggguuaacccuuggcuucaaguccugaugauguaaugagggugggguguauuggcaaucaguacauuuccuuaucgcaauuuacagucauugaaaaucaugcugucauuaaucccagucugacauaccuuuucuaaaauguucacagugcaguguuuuuguggccuaacaaaauuuuucucauaucauuaaaaauaaacauuuuuauaaaaaauauaacacuuuaaauguuuacgucgacaaaaccaguuagaguaaccuacaccacaugcacuauacaguagcaagcacaaaauuccacagaaugaagcaucacaaaguucugcucaggguggcuauuccaucuaggugaaauagcugggauuuucaauugccuuuuucauuuguuucuaaaguauguuuugcuuaacauaaaacacacccuaaugcaaaauaaaacuccccaaaaguuuuguuuccaauugcuugcgaggugggaaccugccaccgagacagaggcuaaucuuuucaauccauccacccuuucuuugcucuaccuaugagcugugauuggaaccaaugaaccuuuuaguaaaauguauccugcuuuacaaacaugcugaguuaucuuuaaaaauauuuaucaacaaauuacuugucuuauuuugaguuuucauuuaaaaaaauacacacaaaacaucuacauguucacauucauuagaucagaguagcaucauucucaaacaguggguuuuuauaugacaacuaaauauuucaugaugacuaaauuauuucauacaaauuuucuuaaugucaucuauguacauuacauccuguucauuuauaaacauguuuugugugaugcuauuuugaaacuuugacuguauugccuauaaauauucuuccaaccaaaggaaugucuauacaaaaauuuauaagggcugggcgcaguggcucaugccuguaauccuagcacuuugggaggcugagguggguggauuucuugaguccaggaguuugaaaccagccuuggcaacauggcaaaaccccgucucuacaaaaaauacaaaaauuagccggggaugguggugugcgccuguagucccagcuauucgggaggcuugagccugggagguggagguugcagugagcuaugaucacaccacugcacuacagcccuggcaacagagugagauccugucucaaaaaacaaacaaacauuuaaaagggaauguuuaccuaaugggugaaugacaccaucaguaaugaaaaauguuauugaccauacaacacacaaaaguguuuugaaacacuagaauucuaaaugaguggccuguucuggggcugccgcuccuguccugagcauuacuaucucuucugaguuuucugugaucaagaagcccucaauauuuccugcuucaauuucccauaugaaaucaagugguaccugauuuuuaaaaaauucaacccagaauucaaguuuuggacuccaauaugacaggaguguugucacggcugcaggccauugguccguggccugugggaccaagccucugguucugaugcucugucagauaagaaauuccuuagaauccaguaauuuaaauaacaauacaaguccuauaauagugcaauuuuggcaagagcaaagaauaucgauggccuuuuaaaggucaggcagugaaaaaaccauuggacaaaguguggacuguugcuuugacauaguacuagcacuaugaugucucccagaaggaggcuggucguguguccaccucaucaucagcguuaucuucugaugacaacagagaaggauacggagcgacacauuuuacguucacauaaguagcguucacauggacauagugcuccccaaugaaaguagagaagaucgcugauauccgggacaccaguucagaaaaggaugggcgcauuucggcuuuagggugccagcauuuuagcauuacuucauauaaggggucugggcaguauucggguuguaggagucuucucccuugcaacaaguaaacaguuauaucaaagguguuuacgucaggauaagguggggcuccucuugucaucagcucccagaggagcacgccaaaggaccacacaucugacuuggugguaaacuuuugaguuugcagacuuuccaaagccauccacuucacuggcagcuuugcaccuguuuuguuguguacacuauaguauucuuuaucauacaugucucuggcaagaccaaaaucagcaaccuugacugugaauuuuucauccagcauacaguuucuugcagccaagucucuguggacaaacuuuuugcuugcaagauauuucaugccuuuggcuacuugaagaccaaagccaauaagaucuuuuacaguuggauuaugagucucauuucgaaugaaauuucgaagaucuccauguuucauguaugguaggaccaccagcggagacccuucacuucgcaggcagauucccaggagcgagaggacauugggaugacuaaaaucuuucaugaugauucccucggucagaaauugggaaacuucuccuaugucagugauucuguucaaggauuucacagcacagugaauuuucuugccaucauuguccaacaaagucccaugauauacacaaccaaaaugcccucuuccuaugacuucauugaaaugcacaaucaggcuacugggcccaaucacuacaugcugcacugccuggaccagcucuggauuuagagcacugaggucaauguggacaguauuuugcaguaauggacuggauauaucagaguccccacuaguuaggaugggggacaugucugucagaggauacugcacuugucggcaugaaccguucugagaugaauuaggaaacugaucuucuggaaaaguagcucgguagucuacagauucauuugaaaccauuucuguaguugggcuuacacuucgggcacuuacaagccuauccaaaugaggaguguguacucuugcaucguagcgaacuaauucacugcccagaucuuuaauuugcuuucucuuuuucagccacaggaaaaacccaaguaguaauaacagugcuguugauauugagacaacaccagcaaucaauccugugaaauucugaucugguugaacuauuacuuuuccaaggacgguugaagaaauugcuugcuuccacucuauauuuagcucgcuguucaauuucagcaggucauuggggaccgugcauaaaacggcuucagaauguaaguguauauucucacagcucuuauuuccaacuuuuaacacuucaccuuuaacugcuucagggucaauaucauuucccugaauuuucaagaugccaaccacuugagugguugaaggagugauuguaaacuuccauucugaccuccaacgaccauuccaaaaauuuuuugcuuggaacugauggcuuucuaugcaugcaauaaugguuugcuguccaucuauuuuuuugccauacacagugcagacuccauucggguaauguucuuuuacguaagcucucagagcaguuucuacugaaguucuccaugauucaacugcauuuucuacuucacagggucuuggaucaguugccuccuuccuuaagugaucaaauuuaaaacagauucuguucuuuggauccaaaaacuuuccauuucccaagucgccauguucuguuaucaauaccugaucuucauaaccuucaauuuuuacuggaguaaacugguccaaguuauacugugcaaaugcaugggcugcuccuucccugagaagauugucauuauuaagcaguaaccgaacaucauugaaaaccucauuaaauucuccaggaggggcaugaaugaugaauuuugcugcuauacgcaccuucucuucaucagacaacugcuccuccagauccgccaucuuccuucuggcgacaaaccgcggcggcggcggcggcagcggccaccugacuuccccguuuccgugcgguccucagcgccgcgcgcccccgcuaagggagggg

SEQ ID NO: 2680 - RNA, 2779 nt, Homo sapiens
uacaagauguugcaucacuuuacuuuaauugcaugauuuaucagaacaacuauuaacauacgaaguaccauucaguucagcugcagguauaggcagugacaaguaucuaauucuuagaagaaucacuuacucccacaaucuguccagacacauuaaucuaaggacaaguuuauaaauagcaaacgugauuuucacauugcaguguucucaagaauguauauacaaguguguaguccuguugaugggauguuuccccgaguucuuucuauugaugcguucaugcucuugacccugguagagacaguucuuucuuuccacagagcagauuuucuuuugucauccaccauuuacaauacucugugaauuaguauuacuuauuacauuuaugaaacggcaauauuuggauuguaauagcucuucaguacaauuccuugugucuucugguaagucucugcacuaucagagagcuuuuaguuauaaucauuuuccugcaacaacagccaaacucaacuauugaguuucagugugacacacccucuuuguagcuugcuggguuaacccuuggcuucaaguccugaugauguaaugagggugggguguauuggcaaucaguacauuuccuuaucgcaauuuacagucauugaaaaucaugcugucauuaaucccagucugacauaccuuuucuaaaauguucacagugcaguguuuuuguggccuaacaaaauuuuucucauaucauuaaaaauaaacauuuuuauaaaaaauauaacacuuuaaauguuuacgucgacaaaaccaguuagaguaaccuacaccacaugcacuauacaguagcaagcacaaaauuccacagaaugaagcaucacaaaguucugcucaggguggcuauuccaucuaggugaaauagcugggauuuucaauugccuuuuucauuuguuucuaaaguauguuuugcuuaacauaaaacacacccuaaugcaaaauaaaacuccccaaaaguuuuguuuccaauugcuugcgaggugggaaccugccaccgagacagaggcuaaucuuuucaauccauccacccuuucuuugcucuaccuaugagcugugauuggaaccaaugaaccuuuuaguaaaauguauccugcuuuacaaacaugcugaguuaucuuuaaaaauauuuaucaacaaauuacuugucuuauuuugaguuuucauuuaaaaaaauacacacaaaacaucuacauguucacauucauuagaucagaguagcaucauucucaaacaguggguuuuuauaugacaacuaaauauuucaugaugacuaaauuauuucauacaaauuuucuuaaugucaucuauguacauuacauccuguucauuuauaaacauguuuugugugaugcuauuuugaaacuuugacuguauugccuauaaauauucuuccaaccaaaggaaugucuauacaaaaauuuauaagggcugggcgcaguggcucaugccuguaauccuagcacuuugggaggcugagguggguggauuucuugaguccaggaguuugaaaccagccuuggcaacauggcaaaaccccgucucuacaaaaaauacaaaaauuagccggggaugguggugugcgccuguagucccagcuauucgggaggcuugagccugggagguggagguugcagugagcuaugaucacaccacugcacuacagcccuggcaacagagugagauccugucucaaaaaacaaacaaacauuuaaaagggaauguuuaccuaaugggugaaugacaccaucaguaaugaaaaauguuauugaccauacaacacacaaaaguguuuugaaacacuagaauucuaaaugaguggccuguucuggggcugccgcuccuguccugagcauuacuaucucuucugaguuuucugugaucaagaagcccucaauauuuccugcuucaauuucccauaugaaaucaagugguaccugauuuuuaaaaaauucaacccagaauucaaguuuuggacuccaauaugacaggaguguugucacggcugcaggccauugguccguggccugugggaccaagccucugguucugaugcucugucagauaagaaauuccuuagaauccaguaauuuaaauaacaauacaaguccuauaauagugcaauuuuggcaagagcaaagaauaucgauggccuuuuaaaggucaggcagugaaaaaaccauuggacaaaguguggacuguugcuuugacauaguacuagcacuaugaugucucccagaaggaggcuggucguguguccaccucaucaucagcguuaucuucugaugacaacagagaaggauacggagcgacacauuuuacguucacauaaguagcguucacauggacauagugcuccccaaugaaaguagagaagaucgcugauauccgggacaccaguucagaaaaggaugggcgcauuucggcuuuagggugccagcauuuuagcauuacuucauauaaggggucugggcaguauucggguuguaggagucuucucccuugcaacaaguaaacaguuauaucaaagguguuuacgucaggauaagguggggcuccucuugucaucagcucccagaggagcacgccaaaggaccacuucucuucaucagacaacugcuccuccagauccgccaucuuccuucuggcgacaaaccgcggcggcggcggcggcagcggccaccugacuuccccguuuccgugcgguccucagcgccgcgcgcccccgcuaagggagggg

SEQ ID NO: 2681 - RNA, 1406 nt, Homo sapiens
ccuauuaaagcagugcucaugauuggguccguaaaaaugcuggagacaucucacauuguuuuuguugacgaucuuguugaagaagucguugacauauuugauagggaaugcacacauggcagaucgauccauugguucggcagaaucuggcuugcuuugugcgaacaccccgaaaagaaugucaucauucaggcuggcuccuauuugucuagcaagcugggccccaggcuugcugacauacgcagccugaaguauauuaaacacuuccuucuuuguggaucucuuuuuucucuuuucugugagaauacacuccagaggcauuuccauguaggaaugcaauccagaguuuauggaacagaaccugauuauucuugugugaaaagucugagcaucuagaguuucccuuuggaccgucaagaaguaaauaaaauuguugcuuucaaaggcauggacauacuuaaugggguaagaaucucugaacucagguaaaacaucaauguaggacugguccgucaaaaacauaaaaccaucuuucguuuccuuuagccuucucacugauaucgaaugcaauggaugaucugggaaauaagaagaauuuaugguauugccuacaaagaaguugaugaaccgguccuuuacagaugaaaggacuuuggcucccagggcgcucaccacacagucaggacacuggcugggcucuucuaucuguggggagaauaugcagugaaccuccgacuguaugucagcaguaugauuguggggaaagacaugucgcuggcaggucccucuguugacgcugccacagcuaaugaguugaucaucauaguaggugucgacaacuagagccauguugauguuaucuuuccaaacaccuccugauaaauuggcuuugcugcugcaguccugacaugggaaacaaucuggguguuccagcacaggcccagucuuguacucagcaaccuucugaaggucuuccucauuuaaaacauaaauguaguuaguggcaccaaggaaaaugugaugcucauguagaaugacauucuggauggguguuuccgcggugaaguugggaagcugauacuucauauucacauucaucucggacuuugcuagugccucuuuacacuccccauugcuccucugcaccaagguaaacaggagcacgaggaugccaggugcaagcacagcgggggccuucauuaugagagguuuaucauaugggaagcauucugcuaaacucuuugauuuacucuucaucaccacccuucucuucaucagacaacugcuccuccagauccgccaucuuccuucuggcgacaaaccgcggcggcggcggcggcagcggccaccugacuuccccguuuccgugcgguccucagcgccgcgcgcccccgcuaagggagggg

SEQ ID NO: 2682 - RNA, 913 nt, Homo sapiens
cuagcaaaccuuaaaggcgaaacugagaugucucagguaccaugaaagccacaugguuagaggcaaagaugcagagcucugaguagaaccauugcucaaaggacuuaccacuguaaaguuccuuccugcuucaugcacauuuaugaccauucucgggacacuaacugaauucagguuuuucccaacaccuguuauugugcucccaccacuaauaaaagauuugguuggaugaauuucauagacaaugggaucuucacgguaacugaagaugcuugucucucgguuggcuaagucaauuuucaauuuaacagcaaacucaguugaaaugguuugggcugggguauaacauucaagaauacuguuugacacacuuuuuaaaguacauguuuuuccaccaauugaaaugugucuagaauucccacuguuuagguaauuuccaguuaaaguaaguaaagugccaccagccauaggaccguauuucggcgaaauacuuguuauuacaggauccacauaggagaauguacuguauuguguugucccguggccauuugaaauaauuauggacauauugaaaugcuuauucauggcaggaccaacugugcauuucaauguauucaucgugcucucacuuaaagucaaggugcagcucucauuuccaaggagaacucuaguuuucuuuaaaucaaauuuauuauuccuccgaaauccaaagucccagccacauauggucagccuugucccuccuucaaggggugcacuauuugggaaaaccuucucuucaucagacaacugcuccuccagauccgccaucuuccuucuggcgacaaaccgcggcggcggcggcggcagcggccaccugacuuccccguuuccgugcgguccucagcgccgcgcgcccccgcuaagggagggg

SEQ ID NO: 2683 - RNA, 1075 nt, Homo sapiens
ucaauuaaguuugagcugaugauuuaagacaguguuuaaagcauuucuuaccuuaauuuccaguacauuuucauugcccauugagaucaucacuggcuuuucaaaaggcuuaaacacaggauuauguacauaaaugagaucaaaguauuuggaaaggaucccaucuaacaugaaaaaggcuuugguuuucagggggaguugcagauucagcuguugcagggaaggagugguacaacagauuaucucugaauuagagcgauguugacaugccacuguaaaguuccuuccugcuucaugcacauuuaugaccauucucgggacacuaacugaauucagguuuuucccaacaccuguuauugugcucccaccacuaauaaaagauuugguuggaugaauuucauagacaaugggaucuucacgguaacugaagaugcuugucucucgguuggcuaagucaauuuucaauuuaacagcaaacucaguugaaaugguuugggcugggguauaacauucaagaauacuguuugacacacuuuuuaaaguacauguuuuuccaccaauugaaaugugucuagaauucccacuguuuagguaauuuccaguuaaaguaaguaaagugccaccagccauaggaccguauuucggcgaaauacuuguuauuacaggauccacauaggagaauguacuguauuguguugucccguggccauuugaaauaauuauggacauauugaaaugcuuauucauggcaggaccaacugugcauuucaauguauucaucgugcucucacuuaaagucaaggugcagcucucauuuccaaggagaacucuaguuuucuuuaaaucaaauuuauuauuccuccgaaauccaaagucccagccacauauggucagccuugucccuccuucaaggggugcacuauuugggaaaaccuucucuucaucagacaacugcuccuccagauccgccaucuuccuucuggcgacaaaccgcggcggcggcggcggcagcggccaccugacuuccccguuuccgugcgguccucagcgccgcgcgcccccgcuaagggagggg

SEQ ID NO: 2684 - RNA, 1289 nt, Homo sapiens
gaguugaugagccaaaacccacacauaaaugagcuuuaaugauuuauuuuaagccugagaauaacauaauuacacuggcuuccuuauuuacaucaugagaggaaugcaggaaucccaccucuauauuuagcucgcuguucaauuucagcaggucauuggggaccgugcauaaaacggcuucagaauguaaguguauauucucacagcucuuauuuccaacuuuuaacacuucaccuuuaacugcuucagggucaauaucauuucccuuaauuuccaguacauuuucauugcccauugagaucaucacuggcuuuucaaaaggcuuaaacacaggauuauguacauaaaugagaucaaaguauuuggaaaggaucccaucuaacaugaaaaaggcuuugguuuucagggggaguugcagauucagcuguugcagggaaggagugguacaacagauuaucucugaauuagagcgauguugacaugccacuguaaaguuccuuccugcuucaugcacauuuaugaccauucucgggacacuaacugaauucagguuuuucccaacaccuguuauugugcucccaccacuaauaaaagauuugguuggaugaauuucauagacaaugggaucuucacgguaacugaagaugcuugucucucgguuggcuaagucaauuuucaauuuaacagcaaacucaguugaaaugguuugggcugggguauaacauucaagaauacuguuugacacacuuuuuaaaguacauguuuuuccaccaauugaaaugugucuagaauucccacuguuuagguaauuuccaguuaaaguaaguaaagugccaccagccauaggaccguauuucggcgaaauacuuguuauuacaggauccacauaggagaauguacuguauuguguugucccguggccauuugaaauaauuauggacauauugaaaugcuuauucauggcaggaccaacugugcauuucaauguauucaucgugcucucacuuaaagucaaggugcagcucucauuuccaaggagaacucuaguuuucuuuaaaucaaauuuauuauuccuccgaaauccaaagucccagccacauauggucagccuugucccuccuucaaggggugcacuauuugggaaaaccuucucuucaucagacaacugcuccuccagauccgccaucuuccuucuggcgacaaaccgcggcggcggcggcggcagcggccaccugacuuccccguuuccgugcgguccucagcgccgcgcgcccccgcuaagggagggg

SEQ ID NO: 2685-2686 - skipped (2 entries)

SEQ ID NO: 2687 - RNA, 4574 nt, Homo sapiens
uuaccauaccaaaacuuuuuuauuauuauuuuuauuauuacuuaugaaaaucuguuuuucagaaacacguugucagauauccaaggaauguauuuuuaagcauguucaccacaguaauauuguaauaauaaaaaaugggagacaacacaaauagaggauaaaggauuaguuaaauaaauuuuagcacaucugugggaggcaauauagagaaaggauggaugugggcucuggagaagacauggccugauuccaaauccugccucagcccuaugagcucaugggccuuggucucugugucuuagguucuucaacuauaaaaaucaugguaaucaugcccacuuuacaaggguuauugugaggaaugagacauuacauguaaauuguuuagaagagaaacagggcauagugagcaucccauaaauuguaguauuacacagauuaugacuuacccuuuagaagaagaagggcagaucuguagguacuaccauagaagaauacuuauuagaaaaagacuuuuugccccuuauagauguuguggggcggggggcgguaaaugauccacucauauauucuuagacuugaguguacauguccaacuacauguaaauuacuauguuauaauuagagaauuauaggaagagaacaauaguuaagcauuuuucauauuuucaguccaacuuucuuaauuuugauucugaaugaaaaucuuaguauggaaaauugaucaacucaacguaaagaguaaaaauaaaaguuuacaaaaucaauuuucauuuuuugaguaauuuauuuaaauuugugaaucuagaaaauguguguuauauauuuauauacagggaauaacaaaaguuaaguguuuaauuggaaagaaaacugugacugauaauauguuguaauuaccauuuuauaauauuacuuuccauugcaaugacuuaaaaugaagaaauaagaauaggaauaauuaugcuaacaaauucacuuuguuuucugugccacuaaauuucuuuaggaucaagaacucuuucauauucagacauuaaacaauauucaaauaauuuuauaaaauagacauacaaguuuacucauauuaaaaaaacaaguugauuuucauuuccuguagaaaaaccaaaacagagcagaugugcaagcaaagauaaaugaaaacacuggcuguuucucaauaaaggugauagucuguuuuucauacuaacuuauguacgauauaauaaauagccacuaaauguaguaacagggggaaacuuggcuggaauuguuccuuuugcaagucguaaccagacuuccugcccauaauuuaauucuaauaaggcauccccaguuaaaacccuaucacaguguauuucacuguuaauauuuucagacucaaaugcaagcuugucuauuccaucaaccacuaaaaauccagaaauaugagcacuaaaugacucgaugguguacuugaaaacauauacuccaagauacggaauucuaaauuuuccaguucuugggguauaugaagcuccauaauugacauccaaguuauuaaacaggauaggaccagguauagucauuccauacguaugagaugcaaaaaaugccaccaugggugcauaucuguaagauccuuuggaaaaaucuggagcuaaagcauuuucuuccacaagcuugauagugcaguugucaccaguaaaaggaugucugcaggcacagguaaagcuaguucuuccauuuaugcacgugcccccauuuuggcacggaugccgacuacagcuugaauacuccucaggauauauuauguuguccguguuucuuugaguccggccuaucaggacugugguaagauuuaccguugguuucuuaagugcguuaauuuucuuuggcaaugauuuuacuugcuucugagacuugacaacauuugccagacuaccaggcaacgaucgaucuauacaacaaguuaaauuagauagggcagcuugaguuuuuauuugaauuauugguuccacaaauucuguuagaccuuucugaagaaguugaauaucuggcagggaauguuuuauccacuuagggaugguagcauucaguucugacacacuuguagaagcauugugacacauuguuaaaacuucguggagaguuuuguuaagcgaaaagaaguuaauugaaagauggauagauuuugcuuccaacgccuuaaaucuggaauuuaauacuugcaguugaagagccugaucucucucauuuguaacuacacugccuuuuuuaacugaaauauaauaagguaugagcgucuggguaacuuuagacucaaugucuugcaaccgagucucaaaauuuuuggaaaucuugguaguuaagaguaguuuuucuuccaaaugacucauauuuugcugguauuuucucacuugggaagugguuucauugaacauuugauacaucuuuuggaaguuggacugauuuaguuucucaucucugggaauaccugcaagggucuuggcgacuugcaaaacaaaguuauaucucugauugucauugaccaaagucugaauagaaucauucagacgguggaacugaggaauaaaugucaaaauaguuuccauaucggagguacauuuaugauggaucucacuauuauccuuaauaguacuuaaagucucuuuuagggcauaguuaucuugaaugaaaucaauagcauuauuuauaauagucauugucuuauugaggccaucuuccauuucuaaggcauauucauugauacgucuuucuaaggcaucaucacgacccuguacuucauuucuaaguaaguugugucuuuuuguaaguucuuugauaauaaaauuuagacuauugacagcacuagucagauuuucuaucuuuuuccuuaucacuauugcuuccuuugguuguucauaugucauugucugucugagugaugcucccugcucaagcaaggguugaaggaucuccauaucauaagucaaaucauuuaguugcucacucauuuuguccaucuuauuguccauuggaaagagaacuucagccaauguuugauuuaacacauguaaauucucuucuguguccuuaaguugaaauuuaaaaucauuucugcauuuggauaacaugucuucacauucaccucugagagacucuuucuccaucuccaaagagacggugagauuguuaaucuugcuuucuugaaugugcaaaucuucaaacauuugcagcaucaucaaacucugcuucuuuauauuuucauguaaaguagacauguacucagugacauuauugcuaacugacucagcagcuggagcauucuucuggucugauaccuguucaguugauaaaagcugcucauguacuuccuucaauuuagaaagaguuuuauugagggauucauaauacagaaugcuucuugaguguuccuguucuagagcaccuucuaaaugagucugcuuuacuucuaguucuuuaauaggcuucucacauguaagagucauuucuugccuuacauucacaaugugauuccuuaguuccacuauaucagucaaagugggccgauucucuugcaccaaaacaaacuuuugcugggcugcuauugaaaccacagauucauuaacuuuuugaauuauuugccuggugcuuucgagguccucugauagacuugauacagucuugaagagcugugcuacagucucuugcaugucauuuugaaaaauuuuaaauuguucucuuacuaugucucuuaucaguacauuaaugcuuuuggauuuuagaccuuuuagaagagauugaaauucucugcuuuuaucuucgcugacuuuuccuucuagggaggaguaaguguuccuuacaucauucacagucaaagaaauauugucaaucuucuucugcagaagagucaguuucauugccugguaguucaccugaucagucauuuuuugcaucacuucugggucaccacagccuugcugcugcugcugcucagcuacuccucugccaacagcuguaugacuuucagccugguugguguguaucaaacuuugcuguuccugggcucuuaguugacauuucggcccacuguauccaggacagcaccuccaauccaaugaggugacaauuuuauguugcauccuauagacaggauuggauaucuucugagaucucugaggacaggauccaccgguccagccacaagguccuuucccaccugggacauaagugaccugguuguccaauaucacugugggagauaaccugguauguacauaagcacaccaauuccuugagggcuccgugcgcuuguuaaggcuccucccgggcacucagggauuuaugucuucggggcacggggguguccuuccuggucccccuccucugcccucccuccccuucucggcuguugggcuccucuccacucccaguugcacagaguccagcugcguuauuuaauaauccuccugcuccuccugccugcgccagcggagcugcucugcccgagccaccgcuucccagucagucauguugagacagagagagagagagaggagaggcggauuggcaguaggucggcgacuauuugu

SEQ ID NO: 2688-2696 - skipped (9 entries)

SEQ ID NO: 2697 - RNA, 2410 nt, Homo sapiens
uacuaaucaacuucaagguuuauugaacuuuuguguuuuaacauuuaaaauacaauagaaauguuuauauuuucucacauuuuacugcacaauacaaaacugauuuaaaugcauuaagaaacaacauuuuguuuuuaaauaaacacuaacaaaauguuuggcaagagauaacacaauuuauuuaaauauauuccgacucaagaugaaggcaagcgguuuaccuagaaagguuuacauauuuuagcuauaguuuuucauugaaccauuuuuuugaaaugucauucuuuucauucaugcuucuuuuauccucuugcuuuagaaguucacaguguuauauaagugaaaaacaagacagauagaaaccacccuaaacauauggcuuuauguacauaaaaaauucaauaauguugccauaaccccuaauacagugugauccuuauuuauuuauuauccagaauaaacuucuguaccuauuaaauucuucaaguauaucuagagcagugcuuguaaaagugaggucccacugcuaaguuaauggccaucucuuugaagaucacuucuaccuucaacauaauuaugguacaguucuaauaguuuuuuuaauuuuacauguaucauacauucucaaauauuccaaaaugcucaaaugagccaaacauauacuuugauuuacaucuaguuuaauauucccuuuauacagcaccagagguuaaaaauggaucugaguaaccaaauauucucuuuccuuuauuaguuagaguuuaucaucauuuauuucuauaacauuaaacccaaauugaagaugaagacacccugggucaaaugcuuucaccuuaaauaaauaaacauuucauccacuucauacuuaaauaccaaguuguuuuccuauaacauauguuucuugguaacaacuacugaaucaacuaagcugaacaccaacuucuuaucuuugaggacuaggcaagucggauaggauucucuagguuugcuuuaaaacuuuuaagaaaccugguugccaguucgucaucaaccacucgacugucacuugacauugugacuguuaugagcuggcgcugcugcaguuuggcauuucccucuucauccucagugagcuucagcacaggucggaaccucccaaccgccaaaaugcaggccugaggaggguuaaucacugcaguaaauucgucgaugccaaacauccccaaguuggaaauacuaaaagauccuccuugguauucuucaggcaacaauuuuccaucucuugcuuucuuugauagagccuuuacagagucagcaauuuccuggauaccuuuagcagcagcaucuuuuaugauuggaguaaguaagccuuuaucuguugccacagccacugaaaugucaauaaauggcaguugcuuugggcccucuccaucccagcuuacauuaacaucuggcauuugcacgauuuuggccaagauuccaucaucacuugcaucuaagguaaccacagcuuugucagucucaauuucacauaaugcaucuccagcacucaccgcuucacuuaugguaauugguccaucaaaggcauugggcaggucugugacugauguacaaucuucuucagguggagcugaagcauugaagcaauaugugucauacugggagguguuggaugugaggauguacaccccuguguuguuugcugcacagauggaguugggguggauccggggaaucaccacgugcccuucuaugaacccauaccugcaggucucaaauccgaugcucagagcuuucuccaucugggccauugugggcaaggugcuauugaaagccuugcagaggucagcggccuccguccgagagaugcuguagcgaccauuuuucuccacguggaauacaccugcaaagcggcagguuauauucaaaucgaucugcgccaggcucagcggcacgaggcagaguccccaggcugcgugccaccaaaacuuguccaugguguccggagcgaacggagggcgcgggcgaaaggagcuggaggaucccugggcgcggggcaggggccggcggaggacgggacgaggauggcggaccgaaccuggcagaggcugggguccgcugggcaaugaggcugccucggaaguuggcugcaguuuuuauucgagguugaaaacagugaccuaagacggagggagggagcgagcgaaggacacacccaagcaaggggggcugugacuaagcagcccgcagagguuuuaagaaguagcagcccucccgggcgggccccucugcccccgccccgugcucugcugaggcuguaaauaaucggggcugccagggacgugggucggggaaccuggagugucgcggggugccugugccuccgagccccacuggccccugcgcccagagacgcacuggcuuucuucuc

SEQ ID NO: 2698 - RNA, 2803 nt, Homo sapiens
uacuaaucaacuucaagguuuauugaacuuuuguguuuuaacauuuaaaauacaauagaaauguuuauauuuucucacauuuuacugcacaauacaaaacugauuuaaaugcauuaagaaacaacauuuuguuuuuaaauaaacacuaacaaaauguuuggcaagagauaacacaauuuauuuaaauauauuccgacucaagaugaaggcaagcgguuuaccuagaaagguuuacauauuuuagcuauaguuuuucauugaaccauuuuuuugaaaugucauucuuuucauucaugcuucuuuuauccucuugcuuuagaaguucacaguguuauauaagugaaaaacaagacagauagaaaccacccuaaacauauggcuuuauguacauaaaaaauucaauaauguugccauaaccccuaauacagugugauccuuauuuauuuauuauccagaauaaacuucuguaccuauuaaauucuucaaguauaucuagagcagugcuuguaaaagugaggucccacugcuaaguuaauggccaucucuuugaagaucacuucuaccuucaacauaauuaugguacaguucuaauaguuuuuuuaauuuuacauguaucauacauucucaaauauuccaaaaugcucaaaugagccaaacauauacuuugauuuacaucuaguuuaauauucccuuuauacagcaccagagguuaaaaauggaucugaguaaccaaauauucucuuuccuuuauuaguuagaguuuaucaucauuuauuucuauaacauuaaacccaaauugaagaugaagacacccugggucaaaugcuuucaccuuaaauaaauaaacauuucauccacuucauacuuaaauaccaaguuguuuuccuauaacauauguuucuugguaacaacuacugaaucaacuaagcugaacaccaacuucuuaucuuugaggacuaggcaagucggauaggauucucuagguuugcuuuaaaacuuuuaagaaaccugguugccaguucgucaucaaccacucgacugucacuugacauugugacuguuaugagcuggcgcugcugcaguuuggcauuucccucuucauccucagugagcuucagcacaggucggaaccucccaaccgccaaaaugcaggccugaggaggguuaaucacugcaguaaauucgucgaugccaaacauccccaaguuggaaauacuaaaagauccuccuugguauucuucaggcaacaauuuuccaucucuugcuuucuuugauagagccuuuacagagucagcaauuuccuggauaccuuuagcagcagcaucuuuuaugauuggaguaaguaagccuuuaucuguugccacagccacugaaaugucaauaaauggcaguugcuuugggcccucuccaucccagcuuacauuaacaucuggcauuuguuuaaggguaacagcugcugccuugaugauaaaaucauuuacugauacuuuaaugucaucuuugaccagaucuugccuaacuuuuaaaacagcuccaaggucacagucagcaguagcauaugcaugagguacaguacuuuuagauucaguuaaucucuuggcaauaacucuucgaauauugcuggcggggauuucagugaaugugcccacugcauuggguuguccaggaguugauacuggugggaucacaggccggggauaagaugguccagcuguggccuguaggggcgaaggugcugugggaguggcugugggggcuggaguuggucuggacucgguaaucuugcccguuuguuucaacuggacaaguuugagagcauccucuuuagugaauaucccccgagggccaguggcugugcccuggcuagcauccagugaguguuuuuccagaauauugcgggcagcuggacuuaaacggaaccguagugucccggguauguguuccuucuugacagggauggaaaucugugguucuggugaggggcgaggcucugaagguuuugaaacuggugguggaggaccuacgucuuugggaauuucaacauguuuccaaucuucuccuucuucuacuaucaaaccaauuagugaaccuagccguauauuuuuacuuccuucuucaaccacgauuuuggccaagauuccaucaucacuugcaucuaagguaaccacagcuuugucagucucaauuucacauaaugcaucuccagcacucaccgcuucaccuuccuuuuucagccauuucacaauguuuccuucuuccauuguaggagacagugauggcauuaguaucuuaaugggaucaccgaucugcgccaggcucagcggcacgaggcagaguccccaggcugcgugccaccaaaacuuguccaugguguccggagcgaacggagggcgcgggcgaaaggagcuggaggaucccugggcgcggggcaggggccggcggaggacgggacgaggauggcggaccgaaccuggcagaggcugggguccgcugggcaaugaggcugccucggaaguuggcugcaguuuuuauucgagguugaaaacagugaccuaagacggagggagggagcgagcgaaggacacacccaagcaaggggggcugugacuaagcagcccgcagagguuuuaagaaguagcagcccucccgggcgggccccucugcccccgccccgugcucugcugaggcuguaaauaaucggggcugccagggacgugggucggggaaccuggagugucgcggggugccugugccuccgagccccacuggccccugcgcccagagacgcacuggcuuucuucuc

SEQ ID NO: 2699 - RNA, 3091 nt, Homo sapiens
uacuaaucaacuucaagguuuauugaacuuuuguguuuuaacauuuaaaauacaauagaaauguuuauauuuucucacauuuuacugcacaauacaaaacugauuuaaaugcauuaagaaacaacauuuuguuuuuaaauaaacacuaacaaaauguuuggcaagagauaacacaauuuauuuaaauauauuccgacucaagaugaaggcaagcgguuuaccuagaaagguuuacauauuuuagcuauaguuuuucauugaaccauuuuuuugaaaugucauucuuuucauucaugcuucuuuuauccucuugcuuuagaaguucacaguguuauauaagugaaaaacaagacagauagaaaccacccuaaacauauggcuuuauguacauaaaaaauucaauaauguugccauaaccccuaauacagugugauccuuauuuauuuauuauccagaauaaacuucuguaccuauuaaauucuucaaguauaucuagagcagugcuuguaaaagugaggucccacugcuaaguuaauggccaucucuuugaagaucacuucuaccuucaacauaauuaugguacaguucuaauaguuuuuuuaauuuuacauguaucauacauucucaaauauuccaaaaugcucaaaugagccaaacauauacuuugauuuacaucuaguuuaauauucccuuuauacagcaccagagguuaaaaauggaucugaguaaccaaauauucucuuuccuuuauuaguuagaguuuaucaucauuuauuucuauaacauuaaacccaaauugaagaugaagacacccugggucaaaugcuuucaccuuaaauaaauaaacauuucauccacuucauacuuaaauaccaaguuguuuuccuauaacauauguuucuugguaacaacuacugaaucaacuaagcugaacaccaacuucuuaucuuugaggacuaggcaagucggauaggauucucuagguuugcuuuaaaacuuuuaagaaaccugguugccaguucgucaucaaccacucgacugucacuugacauugugacuguuaugagcuggcgcugcugcaguuuggcauuucccucuucauccucagugagcuucagcacaggucggaaccucccaaccgccaaaaugcaggccugaggaggguuaaucacugcaguaaauucgucgaugccaaacauccccaaguuggaaauacuaaaagauccuccuugguauucuucaggcaacaauuuuccaucucuugcuuucuuugauagagccuuuacagagucagcaauuuccuggauaccuuuagcagcagcaucuuuuaugauuggaguaaguaagccuuuaucuguugccacagccacugaaaugucaauaaauggcaguugcuuugggcccucuccaucccagcuuacauuaacaucuggcauuuguuuaaggguaacagcugcugccuugaugauaaaaucauuuacugauacuuuaaugucaucuuugaccagaucuugccuaacuuuuaaaacagcuccaaggucacagucagcaguagcauaugcaugagguacaguacuuuuagauucaguuaaucucuuggcaauaacucuucgaauauugcuggcggggauuucagugaaugugcccacugcauuggguuguccaggaguugauacuggugggaucacaggccggggauaagaugguccagcuguggccuguaggggcgaaggugcugugggaguggcugugggggcuggaguuggucuggacucgguaaucuugcccguuuguuucaacuggacaaguuugagagcauccucuuuagugaauaucccccgagggccaguggcugugcccuggcuagcauccagugaguguuuuuccagaauauugcgggcagcuggacuuaaacggaaccguagugucccggguauguguuccuucuugacagggauggaaaucugugguucuggugaggggcgaggcucugaagguuuugaaacuggugguggaggaccuacgucuuugggaauuucaacauguuuccaaucuucuccuucuucuacuaucaaaccaauuagugaaccuagccguauauuuuuacuuccuucuucaaccacgauuuuggccaagauuccaucaucacuugcaucuaagguaaccacagcuuugucagucucaauuucacauaaugcaucuccagcacucaccgcuucacuuaugguaauugguccaucaaaggcauugggcaggucugugacugauguacaaucuucuucagguggagcugaagcauugaagcaauaugugucauacugggagguguuggaugugaggauguacaccccuguguuguuugcugcacagauggaguugggguggauccggggaaucaccacgugcccuucuaugaacccauaccugcaggucucaaauccgaugcucagagcuuucuccaucugggccauugugggcaaggugcuauugaaagccuugcagaggucagcggccuccguccgagagaugcuguagcgaccauuuuucuccacguggaauacaccugcaaagcggcagguuauauucaaaucgaucugcgccaggcucagcggcacgaggcagaguccccaggcugcgugccaccaaaacuuguccaugguguccggagcgaacggagggcgcgggcgaaaggagcuggaggaucccugggcgcggggcaggggccggcggaggacgggacgaggauggcggaccgaaccuggcagaggcugggguccgcugggcaaugaggcugccucggaaguuggcugcaguuuuuauucgagguugaaaacagugaccuaagacggagggagggagcgagcgaaggacacacccaagcaaggggggcugugacuaagcagcccgcagagguuuuaagaaguagcagcccucccgggcgggccccucugcccccgccccgugcucugcugaggcuguaaauaaucggggcugccagggacgugggucggggaaccuggagugucgcggggugccugugccuccgagccccacuggccccugcgcccagagacgcacuggcuuucuucuc

SEQ ID NO: 2700 - RNA, 1975 nt, Homo sapiens
uacuaaucaacuucaagguuuauugaacuuuuguguuuuaacauuuaaaauacaauagaaauguuuauauuuucucacauuuuacugcacaauacaaaacugauuuaaaugcauuaagaaacaacauuuuguuuuuaaauaaacacuaacaaaauguuuggcaagagauaacacaauuuauuuaaauauauuccgacucaagaugaaggcaagcgguuuaccuagaaagguuuacauauuuuagcuauaguuuuucauugaaccauuuuuuugaaaugucauucuuuucauucaugcuucuuuuauccucuugcuuuagaaguucacaguguuauauaagugaaaaacaagacagauagaaaccacccuaaacauauggcuuuauguacauaaaaaauucaauaauguugccauaaccccuaauacagugugauccuuauuuauuuauuauccagaauaaacuucuguaccuauuaaauucuucaaguauaucuagagcagugcuuguaaaagugaggucccacugcuaaguuaauggccaucucuuugaagaucacuucuaccuucaacauaauuaugguacaguucuaauaguuuuuuuaauuuuacauguaucauacauucucaaauauuccaaaaugcucaaaugagccaaacauauacuuugauuuacaucuaguuuaauauucccuuuauacagcaccagagguuaaaaauggaucugaguaaccaaauauucucuuuccuuuauuaguuagaguuuaucaucauuuauuucuauaacauuaaacccaaauugaagaugaagacacccugggucaaaugcuuucaccuuaaauaaauaaacauuucauccacuucauacuuaaauaccaaguuguuuuccuauaacauauguuucuugguaacaacuacugaaucaacuaagcugaacaccaacuucuuaucuuugaggacuaggcaagucggauaggauucucuagguuugcuuuaaaacuuuuaagaaaccugguugccaguucgucaucaaccacucgacugucacuugacauugugacuguuaugagcuggcgcugcugcaguuuggcauuucccucuucauccucagugagcuucagcacaggucggaaccucccaaccgccaaaaugcaggccugaggaggguuaaucacugcaguaaauucgucgaugccaaacauccccaaguuggaaauacuaaaagauccuccuugguauucuucaggcaacaauuuuccaucucuugcuuucuuugauagagccuucuucgacuguugacugcaaugcaaacugcaggucucaaauccgaugcucagagcuuucuccaucugggccauugugggcaaggugcuauugaaagccuugcagaggucagcggccuccguccgagagaugcuguagcgaccauuuuucuccacguggaauacaccugcaaagcggcagguuauauucaaaucgaucugcgccaggcucagcggcacgaggcagaguccccaggcugcgugccaccaaaacuuguccaugguguccggagcgaacggagggcgcgggcgaaaggagcuggaggaucccugggcgcggggcaggggccggcggaggacgggacgaggauggcggaccgaaccuggcagaggcugggguccgcugggcaaugaggcugccucggaaguuggcugcaguuuuuauucgagguugaaaacagugaccuaagacggagggagggagcgagcgaaggacacacccaagcaaggggggcugugacuaagcagcccgcagagguuuuaagaaguagcagcccucccgggcgggccccucugcccccgccccgugcucugcugaggcuguaaauaaucggggcugccagggacgugggucggggaaccuggagugucgcggggugccugugccuccgagccccacuggccccugcgcccagagacgcacuggcuuucuucuc

SEQ ID NO: 2701 - RNA, 2488 nt, Homo sapiens
uacuaaucaacuucaagguuuauugaacuuuuguguuuuaacauuuaaaauacaauagaaauguuuauauuuucucacauuuuacugcacaauacaaaacugauuuaaaugcauuaagaaacaacauuuuguuuuuaaauaaacacuaacaaaauguuuggcaagagauaacacaauuuauuuaaauauauuccgacucaagaugaaggcaagcgguuuaccuagaaagguuuacauauuuuagcuauaguuuuucauugaaccauuuuuuugaaaugucauucuuuucauucaugcuucuuuuauccucuugcuuuagaaguucacaguguuauauaagugaaaaacaagacagauagaaaccacccuaaacauauggcuuuauguacauaaaaaauucaauaauguugccauaaccccuaauacagugugauccuuauuuauuuauuauccagaauaaacuucuguaccuauuaaauucuucaaguauaucuagagcagugcuuguaaaagugaggucccacugcuaaguuaauggccaucucuuugaagaucacuucuaccuucaacauaauuaugguacaguucuaauaguuuuuuuaauuuuacauguaucauacauucucaaauauuccaaaaugcucaaaugagccaaacauauacuuugauuuacaucuaguuuaauauucccuuuauacagcaccagagguuaaaaauggaucugaguaaccaaauauucucuuuccuuuauuaguuagaguuuaucaucauuuauuucuauaacauuaaacccaaauugaagaugaagacacccugggucaaaugcuuucaccuuaaauaaauaaacauuucauccacuucauacuuaaauaccaaguuguuuuccuauaacauauguuucuugguaacaacuacugaaucaacuaagcugaacaccaacuucuuaucuuugaggacuaggcaagucggauaggauucucuagguuugcuuuaaaacuuuuaagaaaccugguugccaguucgucaucaaccacucgacugucacuugacauugugacuguuaugagcuggcgcugcugcaguuuggcauuucccucuucauccucagugagcuucagcacaggucggaaccucccaaccgccaaaaugcaggccugaggaggguuaaucacugcaguaaauucgucgaugccaaacauccccaaguuggaaauacuaaaagauccuccuugguauucuucaggcaacaauuuuccaucucuugcuuucuuugauagagccuuuacagagucagcaauuuccuggauaccuuuagcagcagcaucuuuuaugauuggaguaaguaagccuuuaucuguugccacagccacugaaaugucaauaaauggcaguugcuuugggcccucuccaucccagcuuacauuaacaucuggcauuuguuuaaggguaacagcugcugccuugaugauaaaaucauuuacugauacuuuaaugucaucuuugaccagaucuugccuaacuuuuaaaacagcuccaaggucacagucagcaguagcauaugcaugagguacaguacuuuuagauucaguuaaucucuuggcaauaacucuucgaauauugcuggcggggauuucagugaaugugcccacugcauuggguuguccaggaguugauacuggugggaucacaggccggggauaagaugguccagcuguggccuguaggggcgaaggugcugugggaguggcugugggggcuggaguuggucuggacucgguaaucuugcccguuuguuucaacuggacaaguuugagagcaucccugcaggucucaaauccgaugcucagagcuuucuccaucugggccauugugggcaaggugcuauugaaagccuugcagaggucagcggccuccguccgagagaugcuguagcgaccauuuuucuccacguggaauacaccugcaaagcggcagguuauauucaaaucgaucugcgccaggcucagcggcacgaggcagaguccccaggcugcgugccaccaaaacuuguccaugguguccggagcgaacggagggcgcgggcgaaaggagcuggaggaucccugggcgcggggcaggggccggcggaggacgggacgaggauggcggaccgaaccuggcagaggcugggguccgcugggcaaugaggcugccucggaaguuggcugcaguuuuuauucgagguugaaaacagugaccuaagacggagggagggagcgagcgaaggacacacccaagcaaggggggcugugacuaagcagcccgcagagguuuuaagaaguagcagcccucccgggcgggccccucugcccccgccccgugcucugcugaggcuguaaauaaucggggcugccagggacgugggucggggaaccuggagugucgcggggugccugugccuccgagccccacuggccccugcgcccagagacgcacuggcuuucuucuc

SEQ ID NO: 2702 - RNA, 2722 nt, Homo sapiens
uacuaaucaacuucaagguuuauugaacuuuuguguuuuaacauuuaaaauacaauagaaauguuuauauuuucucacauuuuacugcacaauacaaaacugauuuaaaugcauuaagaaacaacauuuuguuuuuaaauaaacacuaacaaaauguuuggcaagagauaacacaauuuauuuaaauauauuccgacucaagaugaaggcaagcgguuuaccuagaaagguuuacauauuuuagcuauaguuuuucauugaaccauuuuuuugaaaugucauucuuuucauucaugcuucuuuuauccucuugcuuuagaaguucacaguguuauauaagugaaaaacaagacagauagaaaccacccuaaacauauggcuuuauguacauaaaaaauucaauaauguugccauaaccccuaauacagugugauccuuauuuauuuauuauccagaauaaacuucuguaccuauuaaauucuucaaguauaucuagagcagugcuuguaaaagugaggucccacugcuaaguuaauggccaucucuuugaagaucacuucuaccuucaacauaauuaugguacaguucuaauaguuuuuuuaauuuuacauguaucauacauucucaaauauuccaaaaugcucaaaugagccaaacauauacuuugauuuacaucuaguuuaauauucccuuuauacagcaccagagguuaaaaauggaucugaguaaccaaauauucucuuuccuuuauuaguuagaguuuaucaucauuuauuucuauaacauuaaacccaaauugaagaugaagacacccugggucaaaugcuuucaccuuaaauaaauaaacauuucauccacuucauacuuaaauaccaaguuguuuuccuauaacauauguuucuugguaacaacuacugaaucaacuaagcugaacaccaacuucuuaucuuugaggacuaggcaagucggauaggauucucuagguuugcuuuaaaacuuuuaagaaaccugguugccaguucgucaucaaccacucgacugucacuugacauugugacuguuaugagcuggcgcugcugcaguuuggcauuucccucuucauccucagugagcuucagcacaggucggaaccucccaaccgccaaaaugcaggccugaggaggguuaaucacugcaguaaauucgucgaugccaaacauccccaaguuggaaauacuaaaagauccuccuugguauucuucaggcaacaauuuuccaucucuugcuuucuuugauagagccuuuacagagucagcaauuuccuggauaccuuuagcagcagcaucuuuuaugauuggaguaaguaagccuuuaucuguugccacagccacugaaaugucaauaaauggcaguugcuuugggcccucuccaucccagcuuacauuaacaucuggcauuugcacgauuuuggccaagauuccaucaucacuugcaucuaagguaaccacagcuuugucagucucaauuucacauaaugcaucuccagcacucaccgcuucaccuuccuuuuucagccauuucacaauguuuccuucuuccauuguaggagacagugauggcauuaguaucuuaaugggaucacugguagcagggauucugucugugcugucggugauccagggacugucuucgucugggaugggguguacaguagaaaagguguaaaagauguaaccuccugaagugcugcuccuuucacuggaggagccgcugcucacgucaucaucaguaggguugcugggguagaugucuucaggauucguucuguauucuccuuucuggacauagcgggugccaucacgguuaacaauaguuaugguaauugguccaucaaaggcauugggcaggucugugacugauguacaaucuucuucagguggagcugaagcauugaagcaauaugugucauacugggagguguuggaugugaggauguacaccccuguguuguuugcugcacagauggaguugggguggauccggggaaucaccacgugcccuucuaugaacccauaccugcaggucucaaauccgaugcucagagcuuucuccaucugggccauugugggcaaggugcuauugaaagccuugcagaggucagcggccuccguccgagagaugcuguagcgaccauuuuucuccacguggaauacaccugcaaagcggcagguuauauucaaaucgaucugcgccaggcucagcggcacgaggcagaguccccaggcugcgugccaccaaaacuuguccaugguguccggagcgaacggagggcgcgggcgaaaggagcuggaggaucccugggcgcggggcaggggccggcggaggacgggacgaggauggcggaccgaaccuggcagaggcugggguccgcugggcaaugaggcugccucggaaguuggcugcaguuuuuauucgagguugaaaacagugaccuaagacggagggagggagcgagcgaaggacacacccaagcaaggggggcugugacuaagcagcccgcagagguuuuaagaaguagcagcccucccgggcgggccccucugcccccgccccgugcucugcugaggcuguaaauaaucggggcugccagggacgugggucggggaaccuggagugucgcggggugccugugccuccgagccccacuggccccugcgcccagagacgcacuggcuuucuucuc

SEQ ID NO: 2703 - RNA, 3403 nt, Homo sapiens
uacuaaucaacuucaagguuuauugaacuuuuguguuuuaacauuuaaaauacaauagaaauguuuauauuuucucacauuuuacugcacaauacaaaacugauuuaaaugcauuaagaaacaacauuuuguuuuuaaauaaacacuaacaaaauguuuggcaagagauaacacaauuuauuuaaauauauuccgacucaagaugaaggcaagcgguuuaccuagaaagguuuacauauuuuagcuauaguuuuucauugaaccauuuuuuugaaaugucauucuuuucauucaugcuucuuuuauccucuugcuuuagaaguucacaguguuauauaagugaaaaacaagacagauagaaaccacccuaaacauauggcuuuauguacauaaaaaauucaauaauguugccauaaccccuaauacagugugauccuuauuuauuuauuauccagaauaaacuucuguaccuauuaaauucuucaaguauaucuagagcagugcuuguaaaagugaggucccacugcuaaguuaauggccaucucuuugaagaucacuucuaccuucaacauaauuaugguacaguucuaauaguuuuuuuaauuuuacauguaucauacauucucaaauauuccaaaaugcucaaaugagccaaacauauacuuugauuuacaucuaguuuaauauucccuuuauacagcaccagagguuaaaaauggaucugaguaaccaaauauucucuuuccuuuauuaguuagaguuuaucaucauuuauuucuauaacauuaaacccaaauugaagaugaagacacccugggucaaaugcuuucaccuuaaauaaauaaacauuucauccacuucauacuuaaauaccaaguuguuuuccuauaacauauguuucuugguaacaacuacugaaucaacuaagcugaacaccaacuucuuaucuuugaggacuaggcaagucggauaggauucucuagguuugcuuuaaaacuuuuaagaaaccugguugccaguucgucaucaaccacucgacugucacuugacauugugacuguuaugagcuggcgcugcugcaguuuggcauuucccucuucauccucagugagcuucagcacaggucggaaccucccaaccgccaaaaugcaggccugaggaggguuaaucacugcaguaaauucgucgaugccaaacauccccaaguuggaaauacuaaaagauccuccuugguauucuucaggcaacaauuuuccaucucuugcuuucuuugauagagccuuuacagagucagcaauuuccuggauaccuuuagcagcagcaucuuuuaugauuggaguaaguaagccuuuaucuguugccacagccacugaaaugucaauaaauggcaguugcuuugggcccucuccaucccagcuuacauuaacaucuggcauuuguuuaaggguaacagcugcugccuugaugauaaaaucauuuacugauacuuuaaugucaucuuugaccagaucuugccuaacuuuuaaaacagcuccaaggucacagucagcaguagcauaugcaugagguacaguacuuuuagauucaguuaaucucuuggcaauaacucuucgaauauugcuggcggggauuucagugaaugugcccacugcauuggguuguccaggaguugauacuggugggaucacaggccggggauaagaugguccagcuguggccuguaggggcgaaggugcugugggaguggcugugggggcuggaguuggucuggacucgguaaucuugcccguuuguuucaacuggacaaguuugagagcauccucuuuagugaauaucccccgagggccaguggcugugcccuggcuagcauccagugaguguuuuuccagaauauugcgggcagcuggacuuaaacggaaccguagugucccggguauguguuccuucuugacagggauggaaaucugugguucuggugaggggcgaggcucugaagguuuugaaacuggugguggaggaccuacgucuuugggaauuucaacauguuuccaaucuucuccuucuucuacuaucaaaccaauuagugaaccuagccguauauuuuuacuuccuucuucaaccacgauuuuggccaagauuccaucaucacuugcaucuaagguaaccacagcuuugucagucucaauuucacauaaugcaucuccagcacucaccgcuucaccuuccuuuuucagccauuucacaauguuuccuucuuccauuguaggagacagugauggcauuaguaucuuaaugggaucacugguagcagggauucugucugugcugucggugauccagggacugucuucgucugggaugggguguacaguagaaaagguguaaaagauguaaccuccugaagugcugcuccuuucacuggaggagccgcugcucacgucaucaucaguaggguugcugggguagaugucuucaggauucguucuguauucuccuuucuggacauagcgggugccaucacgguuaacaauaguuaugguaauugguccaucaaaggcauugggcaggucugugacugauguacaaucuucuucagguggagcugaagcauugaagcaauaugugucauacugggagguguuggaugugaggauguacaccccuguguuguuugcugcacagauggaguugggguggauccggggaaucaccacgugcccuucuaugaacccauaccugcaggucucaaauccgaugcucagagcuuucuccaucugggccauugugggcaaggugcuauugaaagccuugcagaggucagcggccuccguccgagagaugcuguagcgaccauuuuucuccacguggaauacaccugcaaagcggcagguuauauucaaaucgaucugcgccaggcucagcggcacgaggcagaguccccaggcugcgugccaccaaaacuuguccaugguguccggagcgaacggagggcgcgggcgaaaggagcuggaggaucccugggcgcggggcaggggccggcggaggacgggacgaggauggcggaccgaaccuggcagaggcugggguccgcugggcaaugaggcugccucggaaguuggcugcaguuuuuauucgagguugaaaacagugaccuaagacggagggagggagcgagcgaaggacacacccaagcaaggggggcugugacuaagcagcccgcagagguuuuaagaaguagcagcccucccgggcgggccccucugcccccgccccgugcucugcugaggcuguaaauaaucggggcugccagggacgugggucggggaaccuggagugucgcggggugccugugccuccgagccccacuggccccugcgcccagagacgcacuggcuuucuucuc

SEQ ID NO: 2704 - RNA, 1999 nt, Homo sapiens
uacuaaucaacuucaagguuuauugaacuuuuguguuuuaacauuuaaaauacaauagaaauguuuauauuuucucacauuuuacugcacaauacaaaacugauuuaaaugcauuaagaaacaacauuuuguuuuuaaauaaacacuaacaaaauguuuggcaagagauaacacaauuuauuuaaauauauuccgacucaagaugaaggcaagcgguuuaccuagaaagguuuacauauuuuagcuauaguuuuucauugaaccauuuuuuugaaaugucauucuuuucauucaugcuucuuuuauccucuugcuuuagaaguucacaguguuauauaagugaaaaacaagacagauagaaaccacccuaaacauauggcuuuauguacauaaaaaauucaauaauguugccauaaccccuaauacagugugauccuuauuuauuuauuauccagaauaaacuucuguaccuauuaaauucuucaaguauaucuagagcagugcuuguaaaagugaggucccacugcuaaguuaauggccaucucuuugaagaucacuucuaccuucaacauaauuaugguacaguucuaauaguuuuuuuaauuuuacauguaucauacauucucaaauauuccaaaaugcucaaaugagccaaacauauacuuugauuuacaucuaguuuaauauucccuuuauacagcaccagagguuaaaaauggaucugaguaaccaaauauucucuuuccuuuauuaguuagaguuuaucaucauuuauuucuauaacauuaaacccaaauugaagaugaagacacccugggucaaaugcuuucaccuuaaauaaauaaacauuucauccacuucauacuuaaauaccaaguuguuuuccuauaacauauguuucuugguaacaacuacugaaucaacuaagcugaacaccaacuucuuaucuuugaggacuaggcaagucggauaggauucucuagguuugcuuuaaaacuuuuaagaaaccugguugccaguucgucaucaaccacucgacugucacuugacauugugacuguuaugagcuggcgcugcugcaguuuggcauuucccucuucauccucagugagcuucagcacaggucggaaccucccaaccgccaaaaugcaggccugaggaggguuaaucacugcaguaaauucgucgaugccaaacauccccaaguuggaaauacuaaaagauccuccuugguauucuucaggcaacaauuuuccaucucuugcuuucuuugauagagccuuuacagagucagcaauuuccuggauaccuuuagcagcagcaucuuuuaugauuggaguaaguaagccuuuaucuguugccacagccacugaaaugucaauaaauggcaguugcuuugggcccucuccaucccagcuuacauuaacaucuggcauuuguuuaaggguaacagcugcugccuugaugauaaaaucauuuacugauacuuuaaugucaucgaucugcgccaggcucagcggcacgaggcagaguccccaggcugcgugccaccaaaacuuguccaugguguccggagcgaacggagggcgcgggcgaaaggagcuggaggaucccugggcgcggggcaggggccggcggaggacgggacgaggauggcggaccgaaccuggcagaggcugggguccgcugggcaaugaggcugccucggaaguuggcugcaguuuuuauucgagguugaaaacagugaccuaagacggagggagggagcgagcgaaggacacacccaagcaaggggggcugugacuaagcagcccgcagagguuuuaagaaguagcagcccucccgggcgggccccucugcccccgccccgugcucugcugaggcuguaaauaaucggggcugccagggacgugggucggggaaccuggagugucgcggggugccugugccuccgagccccacuggccccugcgcccagagacgcacuggcuuucuucuc

SEQ ID NO: 2705 - RNA, 2122 nt, Homo sapiens
uacuaaucaacuucaagguuuauugaacuuuuguguuuuaacauuuaaaauacaauagaaauguuuauauuuucucacauuuuacugcacaauacaaaacugauuuaaaugcauuaagaaacaacauuuuguuuuuaaauaaacacuaacaaaauguuuggcaagagauaacacaauuuauuuaaauauauuccgacucaagaugaaggcaagcgguuuaccuagaaagguuuacauauuuuagcuauaguuuuucauugaaccauuuuuuugaaaugucauucuuuucauucaugcuucuuuuauccucuugcuuuagaaguucacaguguuauauaagugaaaaacaagacagauagaaaccacccuaaacauauggcuuuauguacauaaaaaauucaauaauguugccauaaccccuaauacagugugauccuuauuuauuuauuauccagaauaaacuucuguaccuauuaaauucuucaaguauaucuagagcagugcuuguaaaagugaggucccacugcuaaguuaauggccaucucuuugaagaucacuucuaccuucaacauaauuaugguacaguucuaauaguuuuuuuaauuuuacauguaucauacauucucaaauauuccaaaaugcucaaaugagccaaacauauacuuugauuuacaucuaguuuaauauucccuuuauacagcaccagagguuaaaaauggaucugaguaaccaaauauucucuuuccuuuauuaguuagaguuuaucaucauuuauuucuauaacauuaaacccaaauugaagaugaagacacccugggucaaaugcuuucaccuuaaauaaauaaacauuucauccacuucauacuuaaauaccaaguuguuuuccuauaacauauguuucuugguaacaacuacugaaucaacuaagcugaacaccaacuucuuaucuuugaggacuaggcaagucggauaggauucucuagguuugcuuuaaaacuuuuaagaaaccugguugccaguucgucaucaaccacucgacugucacuugacauugugacuguuaugagcuggcgcugcugcaguuuggcauuucccucuucauccucagugagcuucagcacaggucggaaccucccaaccgccaaaaugcaggccugaggaggguuaaucacugcaguaaauucgucgaugccaaacauccccaaguuggaaauacuaaaagauccuccuugguauucuucaggcaacaauuuuccaucucuugcuuucuuugauagagccuuuacagagucagcaauuuccuggauaccuuuagcagcagcaucuuuuaugauuggaguaaguaagccuuuaucuguugccacagccacugaaaugucaauaaauggcaguugcuuugggcccucuccaucccagcuuacauuaacaucuggcauuugcacgauuuuggccaagauuccaucaucacuugcaucuaagguaaccacagcuuugucagucucaauuucacauaaugcaucuccagcacucaccgcuucaccuuccuuuuucagccauuucacaauguuuccuucuuccauuguaggagacagugauggcauuaguaucuuaaugggaucaccgaucugcgccaggcucagcggcacgaggcagaguccccaggcugcgugccaccaaaacuuguccaugguguccggagcgaacggagggcgcgggcgaaaggagcuggaggaucccugggcgcggggcaggggccggcggaggacgggacgaggauggcggaccgaaccuggcagaggcugggguccgcugggcaaugaggcugccucggaaguuggcugcaguuuuuauucgagguugaaaacagugaccuaagacggagggagggagcgagcgaaggacacacccaagcaaggggggcugugacuaagcagcccgcagagguuuuaagaaguagcagcccucccgggcgggccccucugcccccgccccgugcucugcugaggcuguaaauaaucggggcugccagggacgugggucggggaaccuggagugucgcggggugccugugccuccgagccccacuggccccugcgcccagagacgcacuggcuuucuucuc

SEQ ID NO: 2706-2714 - skipped (9 entries)

SEQ ID NO: 2715 - RNA, 6210 nt, Homo sapiens
auauacauacauacaugugcaugcacauacgugcgcauacacgcacauacacacacucucucacucucucucguuuuaucucucuccccucaggagugauuugaauuagacaauaaauagccagacagcacccccaggaaugggcacacaugcagcagcuguccaaaggagaagucacuuuacuuucuuuuaaacuugcaauguuugucuuuauuuuguucuuuauauuuucaaagugaaaagaaauaguacugagucaauuucuuuuuguuuuuuuaaauauuuguucuauguauuuacaagccuuaaaguugcucuaaagauuucaagaguauuaagaguacuuuucucaggguagcacuuuuuuuuuuuuaaacaauucuuggaguucugugguccacagcauuuccuucuguuucaauguuauguauguuuugauuacuauugugauuuuuuaaauuuucugaagcaagcugagaggcaggcagaaagauuugaugccaaaaaaaaaaaaaucuuucuuaccuuguucaccccaaacuuucucaaaucuggacuaaaugcuauaccuuaaaacaaacaugaggugcaucuugaaggggagggaaauuuauuucucugcuuuucuauuauacaaguuguuuacagaaacugcaaauuaaaaaauuacacuggcauuugcaguccuuaaaauaaauuaaaaguucucaacuuuuuuuuuuuuugcuaaacauuuuuuuaaguaugaguccuuguuuaaaaagaaaagauuaaaacagaaaauauuuucuauaaauaauacauguauuuugguuuuagugcucccgcccuaagguuugaaguuuacuuuuauccaguaccuuuuuccuccaugaucaccuuuuuuucucuuuccccucucccacucgugcacacguggggguuucugcgagaauuggccuugcugcacugugauuggcgaagacgugaaacuuuuuaaaaaaauacuuaaauuguuucuuuuguuucauuuuguguauuugaaguuuuaguuauccucagacuccucuucugcuucccgcagccacgugaagaaugccgugacagauuucagagccacgcccuucccauucugcucugcaggguccuugcugcucucccauuuguagaaggcauccucggagaucaccuccucgucauauagacaaucaaaaaacauccgcagcaaauuggcagguugaucaaguuuuacuaucgaugcuuguagugcauaaagugcuugcaguuccuucucuguaucugagucuagguacuugaguaagaucggcacucucugcuugauaacagcaguguccacucugaagguagaagagucggcuauaauagcugcuuuacaaacagcagucauuaaagcucuaaggaauguaggugaacucaucuggauuucgucuagauuagccucuacccagucaaagaucuguucaucauucgcuuuguccucaauaaugaguuucucgagucgcuuauacagcucuucggcagacaguucuuucuuugaaagugcuucagaggaacagggacugucagacucuaugaaguccaacuucugcuccaaaagaaaauuauguacaucuucuccuucugguaaaaaguccuuccagcugaggucagccucccuccauaaggcucccacuuucuuauggcucauuuguuugcauaguaggugcaauauuucagauagcaagaccccagcucuuccaacaggaaguaaagguuugcuaaauucuaugguaaguucucucauggagauuccaccuucuuuuaacaugggggucaccaguucagcaagguacaaccaaauauggggaauaucaauggccaugucaucugccaauuccaaaguuucugaaaaaccuuugaaaaaguccuguuugcugaguuuuucugacuguaccagcugauagaguaauuggcccaugugaucccuggugaucuggcuccuuuccaggguggacuccacucccacucucacaaaaacauguaguaggcccugggcauucagcucuuccacacacugcauggcuuccuuaaaaucauuaauguguagaaauucaucaaugauagauuucgacuuccucuccaguuccucuucugauaaugcagccuugucaugagcugacauugcugaaauuucugguuuugcugacucccuuguuuuauuucgcucagccucagugcuguuccucuccacauccacaccuccugugagcugcuucacggucuccagcaucucucuccgcugcucuucuugagacugauugucuagcaggucuuuacugcugccaccccucaugaaaguauuuggccgagcuguugcagauggaaggggcuugucauucuucucccugcccauacuuccacgacuaguuaagguccuucgggaaucaaacucuacaggcguggauggcguggacccugagggugcuggagguugcagggcagagaaucuguuuaaacuggaagcacuugaccguaaggcaucagucucacuugccuuugcuccaccacugcugccuuuuccccagcugccuagcugugcuuuagguaccagcugaauuuuuucaucaauuguaggcuuagugauuuuuaggaauuuugagggguccaguacccgacuguucuuggccccuuguacaguguuccacccaccuucguccacucucuggacaccuggucuucucuucucuuuggucaugaguugcuggaccuuccuuugcucuucuuguucuucuauuuuagccucuuugugaaucuguucgauaguuuuaggcccuugaucugcucuucgagauacccaauugcacagccuuaggucuauaacaucuugaagcaugaaccgaauccuagaugagguuuuucuuucuuucacaauuuucuccaucugauuaaaguacugguccauacguggcuuugcuuuuucaaaguccaagucuuugccaaugguggugagcaggcgacacaggcacuccagggauucuucaucaugguucuuuagcagcuucaccacacagucaugcaugauggcuucagucagcauuuugaguuuaaagaguucuccaauaaacuugauguugccaauggaucuccgccgggcuuuguccuuggcuucuuccaguucaucaugaagccuuguccucuccucuggagcacuggcagccucaaguucuuucugcuucuucucaaagacaucaucaucugcuuuaucuuuuucaaacuccuucuggcaacgguucaguagcagcuuccggaaauucacuguguuaccaggcuugucugccauggguacuuucagcguuacuagacaucgacacauguuugcguaagccacagagaaacuggguucaucaauagccuucucaaagaccaggucaauaacuccuuucagccgcuccucugugucaacaguaaguccugacacuugcuucaucaguugauugaacaucuguggugucaauuuauuuaagauacuucgaacuuuucuaaaaagcuccuggguuuuaauguuuucgggaucaucggcuuggcugucucguuuuuggcuuggcuuccaggcauuuucugccuuuuucagguguacaucuucuuuuacagaaacugugaugaucuuucuggguucucuucuuuggccagguugagaucuucgugacccaacauucaacaaagguacgccucuuccaccaggugucugccuuccaaaaucagcaaaggcugguguaaagucugguccucgaggcaaaauucgaggauccagaguucgcauuggcaauuuggguugguugaucuugucaagaaccacaucacugauaggaggcaggcccucugguuuuuguauacaggcaggcaugaacuggaaguccagcagaaacucccugucauacugcuucuuaccuucaguaucaguaggcuuccaggauucugguuuaaauggaaauguaaccccaucaccagaacuaucuguggagccugaauuagcaucuauuccuucacccucagaaacacucucagcaccauuacguacuggcucagcuucuucuccauuuucuuccacagcuuucacuuuuuuuaggucagaggggucucuuucaggaugaaaccccuggcucauuuuaucuuguucagauucaaguacuuugucaauggaaagcuccucuucagcuuuaagcuccaauucugccucuaacaucucuucagugguucggguccgaucuuuugguuucuuccaugucuuugguacaguuauagcuauuugagcugggacagggcuccuucuugaauuuaaguuuugagaauccaaaaucucuucuguuugcccaucugcuucuaccucuauuuuguucugaaucucuuuugcaucuucacuaaggcaaguucuuaugcucucguccuccucuaggacucucuggacugugauggcagcacucggagaacuaacaguaguggcagcagcaggaacaaugacuggagugugaggaggagaagcuggaggaguuggaggaguuggaggaaaggaaggaacuguggaaggggugaugggagcugggauacacuccaguuucauuucuucugggggauuuucgagaaucuccaauucaagagucaauggcaauacuuccuguuuuacuauuuccacaaugcucuccguggcugauaauuuuucgcuaacuccauuuauuucauuaauuagguuaguacuagaaaccaguggaauaucauuaggugcuacacuacaggguuucuugcauauaucaucaucauuuucauuuguugguaaagggucugauguuucugugcaagaugugaggcuggguauaggaauugugucuucucuuggggaugagaguucacaucugucaucuauagcaguggugaauauugguuggcuacuaagagcagaagaggugggggcugcaauuguacuucgagcaacagaagaaacagugguaggugauggaggcagaggaagcucugcuauggauacuauugcaguaguuucagaugucuggccuucuuguucuuucuucucuccacugaggacuagccuaaggacuggggaaggagacuuuaacacuggaucugguuuuggcuucuccucuugcuucuggucgcuagcugcagugacaggggugcuggcagcaagaugagcgcucuccacagucccauaaaccacagggcugugcucggggaccuggcugggcagcugaggaggaguagguguggacgugggucuuccuauggguggaguaggauuucugcugccaccuccagacauaaucuccucuguuaugucuuuaccucccugguuuggaucccgaauucuuauaguuuuuuucucucucuuggcuggaggcggcuguugcugcguaggcacuaugauaggugcugacugauacaccggcugacuuggguaaaaaggcguuccauaagcauuggggaaguccccagguccugguccaggauaaaaaggaccuggccccggugguugaacuggauauuguugggggggcccaacauaaggagggccacuaugacgguacugugguauacaguacugaggccccuggggcacuggguacggcaugggcagaugguuaaccaucaugaugugcugauuagccugguacacugcagugggugucugugcaccaggacgaauggaaggacugcuguucgggaugguagcucuaggaggcuguauuugaggccucuggaaaaacuggauaggucugaauccucccggagaacggguuugagguugugaauucauugucugagggguuugaggguauaccagcgugguuggaccugcauucuguccagagggauaagggguuugagagaguccaggggacgaugcaugucccgggggcguugccgcaagauuuggaugccccuuguuuauuucaugugcugaauaaggggaugggguagggguucccggcugucuugccacuuguguuaccuggcuuuucuuccuccccuucagcaagcuugcuuuugggaggaguuucccggguagaauucacaguucgacgaaucggcauggugcuaucuucuaccuucucugcguucggccgguccuggcgcccgcgucccgcacggccucucggcgccgcucccgccgccgcuagucgccuccgccaccgcuguccuccagucccagccgccgagcuc

SEQ ID NO: 2716 - RNA, 6276 nt, Homo sapiens
auauacauacauacaugugcaugcacauacgugcgcauacacgcacauacacacacucucucacucucucucguuuuaucucucuccccucaggagugauuugaauuagacaauaaauagccagacagcacccccaggaaugggcacacaugcagcagcuguccaaaggagaagucacuuuacuuucuuuuaaacuugcaauguuugucuuuauuuuguucuuuauauuuucaaagugaaaagaaauaguacugagucaauuucuuuuuguuuuuuuaaauauuuguucuauguauuuacaagccuuaaaguugcucuaaagauuucaagaguauuaagaguacuuuucucaggguagcacuuuuuuuuuuuuaaacaauucuuggaguucugugguccacagcauuuccuucuguuucaauguuauguauguuuugauuacuauugugauuuuuuaaauuuucugaagcaagcugagaggcaggcagaaagauuugaugccaaaaaaaaaaaaaucuuucuuaccuuguucaccccaaacuuucucaaaucuggacuaaaugcuauaccuuaaaacaaacaugaggugcaucuugaaggggagggaaauuuauuucucugcuuuucuauuauacaaguuguuuacagaaacugcaaauuaaaaaauuacacuggcauuugcaguccuuaaaauaaauuaaaaguucucaacuuuuuuuuuuuuugcuaaacauuuuuuuaaguaugaguccuuguuuaaaaagaaaagauuaaaacagaaaauauuuucuauaaauaauacauguauuuugguuuuagugcucccgcccuaagguuugaaguuuacuuuuauccaguaccuuuuuccuccaugaucaccuuuuuuucucuuuccccucucccacucgugcacacguggggguuucugcgagaauuggccuugcugcacugugauuggcgaagacgugaaacuuuuuaaaaaaauacuuaaauuguuucuuuuguuucauuuuguguauuugaaguuuuaguuauccucagacuccucuucugcuucccgcagccacgugaagaaugccgugacagauuucagagccacgcccuucccauucugcucugcaggguccuugcugcucucccauuuguagaaggcauccucggagaucaccuccucgucauauagacaaucaaaaaacauccgcagcaaauuggcagguugaucaaguuuuacuaucgaugcuuguagugcauaaagugcuugcaguuccuucucuguaucugagucuagguacuugaguaagaucggcacucucugcuugauaacagcaguguccacucugaagguagaagagucggcuauaauagcugcuuuacaaacagcagucauuaaagcucuaaggaauguaggugaacucaucuggauuucgucuagauuagccucuacccagucaaagaucuguucaucauucgcuuuguccucaauaaugaguuucucgagucgcuuauacagcucuucggcagacaguucuuucuuugaaagugcuucagaggaacagggacugucagacucuaugaaguccaacuucugcuccaaaagaaaauuauguacaucuucuccuucugguaaaaaguccuuccagcugaggucagccucccuccauaaggcucccacuuucuuauggcucauuuguuugcauaguaggugcaauauuucagauagcaagaccccagcucuuccaacaggaaguaaagguuugcuaaauucuaugguaaguucucucauggagauuccaccuucuuuuaacaugggggucaccaguucagcaagguacaaccaaauauggggaauaucaauggccaugucaucugccaauuccaaaguuucugaaaaaccuuugaaaaaguccuguuugcugaguuuuucugacuguaccagcugauagaguaauuggcccaugugaucccuggugaucuggcuccuuuccaggguggacuccacucccacucucacaaaaacauguaguaggcccugggcauucagcucuuccacacacugcauggcuuccuuaaaaucauuaauguguagaaauucaucaaugauagauuucgacuuccucuccaguuccucuucugauaaugcagccuugucaugagcugacauugcugaaauuucugguuuugcugacucccuuguuuuauuucgcucagccucagugcuguuccucuccacauccacaccuccugugagcugcuucacggucuccagcaucucucuccgcugcucuucuugagacugauugucuagcaggucuuuacugcugccaccccucaugaaaguauuuggccgagcuguugcagauggaaggggcuugucauucuucucccugcccauacuuccacgacuaguuaagguccuucgggaaucaaacucuacaggcguggauggcguggacccugagggugcuggagguugcagggcagagaaucuguuuaaacuggaagcacuugaccguaaggcaucagucucacuugccuuugcuccaccacugcugccuuuuccccagcugccuagcugugcuuuagguaccagcugaauuuuuucaucaauuguaggcuuagugauuuuuaggaauuuugagggguccaguacccgacuguucuuggccccuuguacaguguuccacccaccuucguccacucucuggacaccuggucuucucuucucuuuggucaugaguugcuggaccuuccuuugcucuucuuguucuucuauuuuagccucuuugugaaucuguucgauaguuuuaggcccuugaucugcucuucgagauacccaauugcacagccuuaggucuauaacaucuugaagcaugaaccgaauccuagaugagguuuuucuuucuuucacaauuuucuccaucugauuaaaguacugguccauacguggcuuugcuuuuucaaaguccaagucuuugccaaugguggugagcaggcgacacaggcacuccagggauucuucaucaugguucuuuagcagcuucaccacacagucaugcaugauggcuucagucagcauuuugaguuuaaagaguucuccaauaaacuugauguugccaauggaucuccgccgggcuuuguccuuggcuucuuccaguucaucaugaagccuuguccucuccucuggagcacuggcagccucaaguucuuucugcuucuucucaaagacaucaucaucugcuuuaucuuuuucaaacuccuucuggcaacgguucaguagcagcuuccggaaauucacuguguuaccaggcuugucugccauggguacuuucagcguuacuagacaucgacacauguuugcguaagccacagagaaacuggguucaucaauagccuucucaaagaccaggucaauaacuccuuucagccgcuccucugugucaacaguaaguccugacacuugcuucaucaguugauugaacaucuguggugucaauuuauuuaagauacuucgaacuuuucuaaaaagcuccuggguuuuaauguuuucgggaucaucggcuuggcugucucguuuuuggcuuggcuuccaggcauuuucugccuuuuucagguguacaucuucuuuuacagaaacugugaugaucuuucuggguucucuucuuuggccagguugagaucuucgugacccaacauucaacaacccuagaggcaggcucuucaugggugggugugacaucaccaguggagggcaaguuggggcuuugcucuguuccagaauuggcaauccaugccugcucugcacuuugcaaauagguacgccucuuccaccaggugucugccuuccaaaaucagcaaaggcugguguaaagucugguccucgaggcaaaauucgaggauccagaguucgcauuggcaauuuggguugguugaucuugucaagaaccacaucacugauaggaggcaggcccucugguuuuuguauacaggcaggcaugaacuggaaguccagcagaaacucccugucauacugcuucuuaccuucaguaucaguaggcuuccaggauucugguuuaaauggaaauguaaccccaucaccagaacuaucuguggagccugaauuagcaucuauuccuucacccucagaaacacucucagcaccauuacguacuggcucagcuucuucuccauuuucuuccacagcuuucacuuuuuuuaggucagaggggucucuuucaggaugaaaccccuggcucauuuuaucuuguucagauucaaguacuuugucaauggaaagcuccucuucagcuuuaagcuccaauucugccucuaacaucucuucagugguucggguccgaucuuuugguuucuuccaugucuuugguacaguuauagcuauuugagcugggacagggcuccuucuugaauuuaaguuuugagaauccaaaaucucuucuguuugcccaucugcuucuaccucuauuuuguucugaaucucuuuugcaucuucacuaaggcaaguucuuaugcucucguccuccucuaggacucucuggacugugauggcagcacucggagaacuaacaguaguggcagcagcaggaacaaugacuggagugugaggaggagaagcuggaggaguuggaggaguuggaggaaaggaaggaacuguggaaggggugaugggagcugggauacacuccaguuucauuucuucugggggauuuucgagaaucuccaauucaagagucaauggcaauacuuccuguuuuacuauuuccacaaugcucuccguggcugauaauuuuucgcuaacuccauuuauuucauuaauuagguuaguacuagaaaccaguggaauaucauuaggugcuacacuacaggguuucuugcauauaucaucaucauuuucauuuguugguaaagggucugauguuucugugcaagaugugaggcuggguauaggaauugugucuucucuuggggaugagaguucacaucugucaucuauagcaguggugaauauugguuggcuacuaagagcagaagaggugggggcugcaauuguacuucgagcaacagaagaaacagugguaggugauggaggcagaggaagcucugcuauggauacuauugcaguaguuucagaugucuggccuucuuguucuuucuucucuccacugaggacuagccuaaggacuggggaaggagacuuuaacacuggaucugguuuuggcuucuccucuugcuucuggucgcuagcugcagugacaggggugcuggcagcaagaugagcgcucuccacagucccauaaaccacagggcugugcucggggaccuggcugggcagcugaggaggaguagguguggacgugggucuuccuauggguggaguaggauuucugcugccaccuccagacauaaucuccucuguuaugucuuuaccucccugguuuggaucccgaauucuuauaguuuuuuucucucucuuggcuggaggcggcuguugcugcguaggcacuaugauaggugcugacugauacaccggcugacuuggguaaaaaggcguuccauaagcauuggggaaguccccagguccugguccaggauaaaaaggaccuggccccggugguugaacuggauauuguugggggggcccaacauaaggagggccacuaugacgguacugugguauacaguacugaggccccuggggcacuggguacggcaugggcagaugguuaaccaucaugaugugcugauuagccugguacacugcagugggugucugugcaccaggacgaauggaaggacugcuguucgggaugguagcucuaggaggcuguauuugaggccucuggaaaaacggagaacggguuugagguugugaauucauugucugagggguuugaggguauaccagcgugguuggaccugcauucuguccagagggauaagggguuugagagaguccaggggacgaugcaugucccgggggcguugccgcaagauuuggaugccccuuguuuauuucaugugcugaauaaggggaugggguagggguucccggcugucuugccacuuguguuaccgugcuguagacugcugagacagcgggagugaagauucgauccucaagagguuguugcacagguccucuaggaauucucugcguucggccgguccuggcgcccgcgucccgcacggccucucggcgccgcucccgccgccgcuagucgccuccgccaccgcuguccuccagucccagccgccgagcuc

SEQ ID NO: 2717 - RNA, 2396 nt, Homo sapiens
uucgugacauauaccuuggaggcauuuuguauauuuggaaauucucauuugcauuuuuagacaauggaguaacucuuuugcagguuguacuaaaacacaaacacaccacugaagaaaccagacuaggaauuucagcauucauucgauguuucugggacagggcuccuucuugaauuuaaguuuugagaauccaaaaucucuucuguuugcccaucugcuucuaccucuauuuuguucugaaucucuuuugcaucuucacuaaggcaaguucuuaugcucucguccuccucuaggacucucuggacugugauggcagcacucggagaacuaacaguaguggcagcagcaggaacaaugacuggagugugaggaggagaagcuggaggaguuggaggaguuggaggaaaggaaggaacuguggaaggggugaugggagcugggauacacuccaguuucauuucuucugggggauuuucgagaaucuccaauucaagagucaauggcaauacuuccuguuuuacuauuuccacaaugcucuccguggcugauaauuuuucgcuaacuccauuuauuucauuaauuagguuaguacuagaaaccaguggaauaucauuaggugcuacacuacaggguuucuugcauauaucaucaucauuuucauuuguugguaaagggucugauguuucugugcaagaugugaggcuggguauaggaauugugucuucucuuggggaugagaguucacaucugucaucuauagcaguggugaauauugguuggcuacuaagagcagaagaggugggggcugcaauuguacuucgagcaacagaagaaacagugguaggugauggaggcagaggaagcucugcuauggauacuauugcaguaguuucagaugucuggccuucuuguucuuucuucucuccacugaggacuagccuaaggacuggggaaggagacuuuaacacuggaucugguuuuggcuucuccucuugcuucuggucgcuagcugcagugacaggggugcuggcagcaagaugagcgcucuccacagucccauaaaccacagggcugugcucggggaccuggcugggcagcugcugaggaggaguagguguggacgugggucuuccuauggguggaguaggauuucugcugccaccuccagacauaaucuccucuguuaugucuuuaccucccugguuuggaucccgaauucuuauaguuuuuuucucucucuuggcuggaggcggcuguugcugcguaggcacuaugauaggugcugacugauacaccggcugacuuggguaaaaaggcguuccauaagcauuggggaaguccccagguccugguccaggauaaaaaggaccuggccccggugguugaacuggauauuguugggggggcccaacauaaggagggccacuaugacgguacugugguauacaguacugaggccccuggggcacuggguacggcaugggcagaugguuaaccaucaugaugugcugauuagccugguacacugcagugggugucugugcaccaggacgaauggaaggacugcuguucgggaugguagcucuaggaggcuguauuugaggccucuggaaaaacugaugauggggaggucgaggccccgcugcaaacggagaacggguuugagguugugaauucauugucugagggguuugaggguauaccagcgugguuggaccugcauucuguccagagggauaagggguuugagagaguccaggggacgaugcaugucccgggggcguugccgcaagauuuggaugccccuuguuuauuucaugugcugaauaaggggaugggguagggguucccggcugucuugccacuuguguuaccgugcuguagacugcugagacagcgggagugaagauucgauccucaagagguuguugcacagguccucuaggaauucucaccacuccugccuccaucucuuacaaacgcucagaugggcgacuguaacuuucugacgaccuaccgaggcaccgcucucauucaaaccccaccgccuaagguggcgaguaaccaguucuacguuucccaccgggggagcgagacucaaggccgccgucgcggagcagcaaagcgacagccgacagccccgcccgcagaaggccgcgggaaggacggcaagagcagcggagacaaagcagcgaggcgagguagcuacaggccacagcggcgaacgcgcacggcgggggagagcgcgggccgccagcgaggcggggaaagcucggaccgcggacaccgacggaugaggcuggggcucggcgcggugacaguucggggcucacgcucggcagggacaccgcggcgcccgccccggcgacggaagcagcggcggaacgcgagccucg

SEQ ID NO: 2718 - RNA, 2942 nt, Homo sapiens
auauacauacauacaugugcaugcacauacgugcgcauacacgcacauacacacacucucucacucucucucguuuuaucucucuccccucaggagugauuugaauuagacaauaaauagccagacagcacccccaggaaugggcacacaugcagcagcuguccaaaggagaagucacuuuacuuucuuuuaaacuugcaauguuugucuuuauuuuguucuuuauauuuucaaagugaaaagaaauaguacugagucaauuucuuuuuguuuuuuuaaauauuuguucuauguauuuacaagccuuaaaguugcucuaaagauuucaagaguauuaagaguacuuuucucaggguagcacuuuuuuuuuuuuaaacaauucuuggaguucugugguccacagcauuuccuucuguuucaauguuauguauguuuugauuacuauugugauuuuuuaaauuuucugaagcaagcugagaggcaggcagaaagauuugaugccaaaaaaaaaaaaaucuuucuuaccuuguucaccccaaacuuucucaaaucuggacuaaaugcuauaccuuaaaacaaacaugaggugcaucuugaaggggagggaaauuuauuucucugcuuuucuauuauacaaguuguuuacagaaacugcaaauuaaaaaauuacacuggcauuugcaguccuuaaaauaaauuaaaaguucucaacuuuuuuuuuuuuugcuaaacauuuuuuuaaguaugaguccuuguuuaaaaagaaaagauuaaaacagaaaauauuuucuauaaauaauacauguauuuugguuuuagugcucccgcccuaagguuugaaguuuacuuuuauccaguaccuuuuuccuccaugaucaccuuuuuuucucuuuccccucucccacucgugcacacguggggguuucugcgagaauuggccuugcugcacugugauuggcgaagacgugaaacuuuuuaaaaaaauacuuaaauuguuucuuuuguuucauuuuguguauuugaaguuuuaguuauccucagacuccucuucugcuucccgcagccacgugaagaaugccgugacagauuucagagccacgcccuucccauucugcucugcaggguccuugcugcucucccauuuguagaaggcauccucggagaucaccuccucgucauauagacaaucaaaaaacauccgcagcaaauuggcagguugaucaaguuuuacuaucgaugcuuguagugcauaaagugcuugcaguuccuucucuguaucugagucuagguacuugaguaagaucggcacucucugcuugauaacagcaguguccacucugaagguagaagagucggcuauaauagcugcuuuacaaacagcagucauuaaagcucuaaggaauguaggugaacucaucuggauuucgucuagauuagccuuaauggccucaguuaagauugcauccaucuugggacguggggaagaagccaucgguguuuguuucugggcccuggcuagcuggcuggcagaaaggguagcccaggaaggaauuguuuuuuucacuuucuucuccuuuucuuuagacugaucuuucucacuuuaaaacaaagaauuguuauuauagaagauaagcucucuagaaagacguauaaagucagaaggaggaaaagaccagggagggauaaaaauuaaugcuuuaauuuauuuacaggcuaagaugacauguaccauaagcaaaauuuuacaaaauaaaucuucuuuaaaaacuggguacuauaaaugaauuaaaaagguauuuuucucuuagcugcaggagaaaggagucacauaaauuagcacugguauaagggcucaguacauaagacaaaugagaauuuuaaaaugcacauuaguuaacaauuacaacagaugcaauaugguauaguggaaaaaacucaagcucuuaaagucagaaaaccuuuguuuguauuuucacucaaacauuuacuagcuagcuauaugaucuuaguaaaugaugugagucuuucuccucagcuauaaaacaguaauauagaaccaacuauuucccaagguguugcaagaauuauaagaguauguuuaucaaaacaauuuugugagauuuaaagcauuauguaaauuuuauucugaguauauaacaguacucugugcaccuaauaggugcauuagaacauuuaacaacagacgauaggcugggugcaguggcucaugccuguaaucccagcaauuuaggaggcugaggagggaggacagcuugaggccaggaguucaagcccaaccuagccaacauagugagacgccaucuccauuaaacacacacacacacacacaaacacacccacacccacacacgauaguugcuauaaauuccacagaccuuagcuauacuuaugaaacucagauaaagaauacccugaagauuauagcuagaagguauaguuauuacuaaguuauucuuuuauggucaugugcuguguaacaauauuuggucaacagaccacauauacaaugguggucccuuaagauuauaauggaacugaaaaccuccuauuaccugguuaacaugauagcugugguaauaucacagcgcagcacguuacucacuuguuuguggugacauugguguaaacaaaccuacagugcugccagucauacaaaaauauagcauauuggcugggcgcggugacucaugccuguaaucccagcacuuugggaggccaaggugggcggaucacaaggucaaaagauugagaccauccuggccaacauggugaaacccccgucucuccugaaaauacaaaaauuagcuagguguggaggugcacgccuguagucccagcuacuuggcagguugaggcaggagaaucgcuugaaccugggagguggagguugcagugagcccagaucgcgccacugcacucca

SEQ ID NO: 2719 - RNA, 2573 nt, Homo sapiens
uucgugacauauaccuuggaggcauuuuguauauuuggaaauucucauuugcauuuuuagacaauggaguaacucuuuugcagguuguacuaaaacacaaacacaccacugaagaaaccagacuaggaauuucagcauucauucgauguuucugggacagggcuccuucuugaauuuaaguuuugagaauccaaaaucucuucuguuugcccaucugcuucuaccucuauuuuguucugaaucucuuuugcaucuucacuaaggcaaguucuuaugcucucguccuccucuaggacucucuggacugugauggcagcacucggagaacuaacaguaguggcagcagcaggaacaaugacuggagugugaggaggagaagcuggaggaguuggaggaguuggaggaaaggaaggaacuguggaaggggugaugggagcugggauacacuccaguuucauuucuucugggggauuuucgagaaucuccaauucaagagucaauggcaauacuuccuguuuuacuauuuccacaaugcucuccguggcugauaauuuuucgcuaacuccauuuauuucauuaauuagguuaguacuagaaaccaguggaauaucauuaggugcuacacuacaggguuucuugcauauaucaucaucauuuucauuuguugguaaagggucugauguuucugugcaagaugugaggcuggguauaggaauugugucuucucuuggggaugagaguucacaucugucaucuauagcaguggugaauauugguuggcuacuaagagcagaagaggugggggcugcaauuguacuucgagcaacagaagaaacagugguaggugauggaggcagaggaagcucugcuauggauacuauugcaguaguuucagaugucuggccuucuuguucuuucuucucuccacugaggacuagccuaaggacuggggaaggagacuuuaacacuggaucugguuuuggcuucuccucuugcuucuggucgcuagcugcagugacaggggugcuggcagcaagaugagcgcucuccacagucccauaaaccacagggcugugcucggggaccuggcugggcagcugcugaggaggaguagguguggacgugggucuuccuauggguggaguaggauuucugcugccaccuccagacauaaucuccucuguuaugucuuuaccucccugguuuggaucccgaauucuuauaguuuuuuucucucucuuggcuggaggcggcuguugcugcguaggcacuaugauaggugcugacugauacaccggcugacuuggguaaaaaggcguuccauaagcauuggggaaguccccagguccugguccaggauaaaaaggaccuggccccggugguugaacuggauauuguugggggggcccaacauaaggagggccacuaugacgguacugugguauacaguacugaggccccuggggcacuggguacggcaugggcagaugguuaaccaucaugaugugcugauuagccugguacacugcagugggugucugugcaccaggacgaauggaaggacugcuguucgggaugguagcucuaggaggcuguauuugaggccucuggaaaaacggagaacggguuugagguugugaauucauugucugagggguuugaggguauaccagcgugguuggaccugcauucuguccagagggauaagggguuugagagaguccaggggacgaugcaugucccgggggcguugccgcaagauuuggaugccccuuguuuauuucaugugcugaauaaggggaugggguagggguucccggcugucuugccacuuguguuaccuggcuuuucuuccuccccuucagcaagcuugcuuuugggaggaguuucccggguagaauucacaguucgacgaaucggcauggugcuaucuucuaccuuuuguccgcguggaucagcugagcuccuacuauaagugggagugccuuaggauggacgaguucaccuugagacguaucagucgccauuuuaaauaauuucuaggcccgaguacagguuacacucugaagccucugcuguuaaccacaaggauuuuuccuaaugguuucaguguggugaagaaucaaccucaccacuccugccuccaucucuuacaaacgcucagaugggcgacuguaacuuucugacgaccuaccgaggcaccgcucucauucaaaccccaccgccuaagguggcgaguaaccaguucuacguuucccaccgggggagcgagacucaaggccgccgucgcggagcagcaaagcgacagccgacagccccgcccgcagaaggccgcgggaaggacggcaagagcagcggagacaaagcagcgaggcgagguagcuacaggccacagcggcgaacgcgcacggcgggggagagcgcgggccgccagcgaggcggggaaagcucggaccgcggacaccgacggaugaggcuggggcucggcgcggugacaguucggggcucacgcucggcagggacaccgcggcgcccgccccggcgacggaagcagcggcggaacgcgagccucg

SEQ ID NO: 2720-2795 - skipped (76 entries)

SEQ ID NO: 2796 - RNA, 571 nt, Homo sapiens
aucuguaguuuaaagguccaauuuauuaggagauuaagagauguauuuauuauacauggacuauaaauacugcacagcugacuuuauucacagucaagcagagauauagucagugccaaccuauuuuguggauacucuuguucuuuuguuccaagaaaaguuugcaccauaagacuuggacuuggguuuuggaaccuuccucucuucaaugucauagcuccauccuccaaguucuuuuacauucaagauggcauucuggaauggcacugcuuuaauacuaaaaccuguggucgacacgacguuaucggggcuuucacugcagaguuuggacaacagacugguuuugccagaaccugugaggccuaugcaaaccaggucauauucuggucgugcaggugguggucccuugcagcaaagugcucuaaaacacagauaauccauguacagaaacgccucaguuauucggagaucagacauccggcagccuaaagcauccggaacggcuccgaacccggaaaaaaaaagcagcgucucuggcugcgagcgagcagcuccugaaaaagccagcaac

SEQ ID NO: 2797 - RNA, 613 nt, Homo sapiens
aucuguaguuuaaagguccaauuuauuaggagauuaagagauguauuuauuauacauggacuauaaauacugcacagcugacuuuauucacagucaagcagagauauagucagugccaaccuauuuuguggauacucuuguucuuuuguuccaagaaaaguuugcaccauaagacuuggacuuggguuuuggaaccuuccucucuucaaugucauagcuccauccauuuuuuucugcaaaggaaacugcaucuucuuuaguacugaagguuagaaccauguuggauaagggaucagccguugaugcccaacccaucaaaggauuuucccaucgcucucugguaucaaacuccaucuuccauuucuuuguguuguuuacuccagacugcauguuauugcgagcaggaacaaagauccugacuuuucuaguuuuuauaugcucuucuggaacuccaguuaaaguagugauauccagauaauccauguacagaaacgccucaguuauucggagaucagacauccggcagccuaaagcauccggaacggcuccgaacccggaaaaaaaaagcagcgucucuggcugcgagcgagcagcuccugaaaaagccagcaac

SEQ ID NO: 2798 - RNA, 511 nt, Homo sapiens
aucuguaguuuaaagguccaauuuauuaggagauuaagagauguauuuauuauacauggacuauaaauacugcacagcugacuuuauucacagucaagcagagauauagucagugccaaccuauuuuguggauacucuuguucuuuuguuccaagaaaaguuugcaccauaagacuuggacuuggguuuuggaaccuuccucucuucaaugucauagcuccauccuguggucgacacgacguuaucggggcuuucacugcagaguuuggacaacagacugguuuugccagaaccugugaggccuaugcaaaccaggucauauucuggucgugcaggugguggucccuugcagcaaagugcucuaaaacacagauaauccauguacagaaacgccucaguuauucggagaucagacauccggcagccuaaagcauccggaacggcuccgaacccggaaaaaaaaagcagcgucucuggcugcgagcgagcagcuccugaaaaagccagcaac

SEQ ID NO: 2799 - RNA, 1027 nt, Homo sapiens
aucuguaguuuaaagguccaauuuauuaggagauuaagagauguauuuauuauacauggacuauaaauacugcacagcugacuuuauucacagucaagcagagauauagucagugccaaccuauuuuguggauacucuuguucuuuuguuccaagaaaaguuugcaccauaagacuuggacuuggguuuuggaaccuuccucucuucaaugucauagcuccauccauuuuuuucugcaaaggaaacugcaucuucuuuaguacugaagguuagaaccauguuggauaagggaucagccguugaugcccaacccaucaaaggauuuucccaucgcucucugguaucaaacuccaucuuccauuucuuuguguuguuuacuccagacugcauguuauugcgagcaggaacaaagauccugacuuuucuaguuuuuauaugcucuucuggaacuccaguuaaaguagugauauccucuuguacugagcgagcugcuggcuugucuugaugauuggccaauauuaaaaaggguaaagugcauaacuguggaugcugaagagcugagugcagcucauuucuagcagcuucuaaaucauccucugaagaggcacugucuaauacaaauauuaccccuugagauccuugguaguagcggcuccaguauuuccggauguuaucagccccuccaaguucuuuuacauucaagauggcauucuggaauggcacugcuuuaauacuaaaaccuguggucgacacgacguuaucggggcuuucacugcagaguuuggacaacagacugguuuugccagaaccugugaggccuaugcaaaccaggucauauucuggucgugcaggugguggucccuugcagcaaagugcucuaaaacacagauaauccauguacagaaacgccucaguuauucggagaucagacauccggcagccuaaagcauccggaacggcuccgaacccggaaaaaaaaagcagcgucucuggcugcgagcgagcagcuccugaaaaagccagcaac

SEQ ID NO: 2800 - RNA, 10012 nt, Homo sapiens
uuuacacgguaauagaaaucccacauuuuaauacauugccaugcacauaaggagucaaguaaugcugaauacaaaauagucaaauauacaaaaugauaaagcagauuuuccagccugauagagaucaugcucacagauacaagggaggcaaacaucuguacaguuucauuuuuauccauuuuauaagagucaugccccccucaacucuuuuugaggacaacuggaaacagaaggaaacauaagaauauacaaaggagacccaaagggaauuggcaaguugauagcugcugaagauauggaaaucggugguucaaaauugugguacacaauaauucuuauguuuagagaaaaaaaguuucuaaacaucuuaugcccuggaagccaggaaacuaaaguggauauccaacagaaaaggcacucuuguuuuaccacauaacuugauugccuccuccuaagucuaguccugggaguuuuucuaggaugcacagaggaaaaaaaaaaaaaaaaaaaaaaagaaagaaaaacccaacaguugugggaaaugaauacagguaauacuuauguaauuaaacacucuuggaagaccaacagaauuaagacugcugguuuaacuacucacuuaaggaaguuauaaaaaugucaaccaucuaccuaggcuucuguguucugacaugugcuuuuuagccauguuuguuagugucugugaaggaaugaaucauuuuuuuaaucagauucucccccauccucccuucucauacucuguaaagagcacugcucuuauguucaauucacauuguguaauuuuucuuccucuuucuuuccuagaacaaacaccaauuugcaguaguucaucaaaaaaguuugauguggcugucugcuuccugugccucucaguuuggcaccuccacacucugacgggucuucuccaaccugggauuggcagucuucaccuugguagaucauggagcucuaaaucuuugggaggugaagaaguggaaauaaauggacaccugggcuguggacucugcagacuagccucauauauuagaaaaagugugugugugugugugugugugcguguguguaaaaugcugauuguuacuucuucaucauucuguuuccuuuguaaaucccagaauggaggcucagaaauaacagcucuacagagaaagccucaaguaagggaaaggaaucauugaauaaagccugcagcccagaucggcacucuaauuacacauaagggauauuggaggcacaguauagcuucuucccuuagcucauuuuagccuccaaacaaccccaucugcuaaggagggacagagagcaccccauacugaagagcaguggcccagagagacugggcuauuucuauuagucuagcauucuugaauucaaaacauuuucuuccuuuuuaucagagcagugucaaucuccacaaaguucuaagaauaacucaaguauauaaaccacaacagaucgauauuuucuuuucucaggugcuuuuuacuguuaauauuaaauuuuguuacaagauugaucuuuucuaaaauuuugugcaaagcuauuuaauuuagugccugauauuaaauaauuacauuaacugaaacuacaauaguaugauuuaaugauacaagaguuucaguggaauuaguuuccaaauauuugugcuggcuugacuuuucagcagacugguuccuucugucccaaucaugacugugacacacaguacaaagucaagagccugguauuauucagcucucugcaaugugagcuucuuuuacuaguuaaaccauggucuucucagacauggccuuguaaggacaacaucuuucuauugguggaagaaagguggugguggagaaaccauucagagccccagagagcccuaaaauugccuacgagcaugaguuuaagcaaauagaaccccuuuuacccccagugagggccaacacccaccaaagaggccucccuuucuggugaucugaggugggaauugaauaaaacuaaaaaagacaaggguuucagcauucaaacaugaauuuccuaccccacucuacauucaucuuuaagguuuccaucugcaaccgaaggccuuuuugaugugaaaaagaacugggucaggcacuucgaaaccucugcagcagcugguaugugggaaaacauaaccuugguccucucucaaaugcacuguaugguaucuggacauaagcauugucaaaaguagacauagagccagcaggcaguucccaacauuaacacgcuaaaugcacuaaauugugguugaaaaaaaauacuggagauuauauauauauauauauauauauauauauauauauauauauauauauauauauauagagagagagagagagagagagagagagagagagagagagugagaaaaguagaacugauuuagggaucauagaaucaaggaccacaggcaugcucaaacucaaaucauauuuuuggaauuauacuuggauaagaagucucuauagagguuagaaagauaauuucauggcauuuuugcuauuuuagaggcaaggcuaacuccucugagaagaugggagaagaccaugaucaguuuguggaauaggacaggaccaacccugaggugccuggggcauuucagccagcaaauuuuucuaugaaguuaucuucaagaucaguuauccuacccuaagugaaagcaugaucuaguaagagucuccuguuuugcauuuuuuuuagcauuacauauuugaauauauuuuuacagaauuugggcgguggcggugauuaaaugcaaucauauuacagaucuguuugcucucaugcauccacucagucuggacuucuacauuugguagaugugucugugcuaauguggcaaaagccauaugaaaccaaccauuuauuucucuugauccaaaugacugaauuuaaaaagguuauaaacaauguggaaggcaaccagcagagucuucaguguuuuaauuguuugagguauuaguaucuccagugauggauuaauuuaauagccuccuuccuugagguucacaucaguagggcuguuauuaauacucugcacaugaggcaaaaaggccugggcuuaagagccuuucuaaggcuucucaaaauaucugagguuuggaaaacaacaacgcaacaaauaaccaaccaaccaaacaaacaaacaaacaaaaaaccucccaaaccauuggcuccaauuuaugaaaauugaaaagaauuuaugaaaauugaaaagaauaugaaauuaugaaaauaauuuuguaugaucagaaauaaugucuaaauaucuaugacacuuauuaugucaaccagccaaugguaauucaacacaagucauauguuuacuuuuacauuacauuaaguauaugcuguuggugccuucuugugcuugauauaauuguaggaggaaagcucugaaggaagaaugcuuggagugcaucaggguuuuuaaauagccuuacguggcaaauugaacuucaguuuuaugauaucuuuggcauccauuuucugcuguuccauggaagucaugucucagucauuuugccguuaggcaggaaguauaaaacuagcccuaugccugauggcaguucccuuuuacauuuguugcugguaaauuucaccugaaaaaauuuagauuuuagaaacagugcuugcucucacccagaauuuucccuguggagcuaaggugauggacagaaggccaucaguacuguuacuguccuuuuagcuacuuuccccaaaugagaagcaucuauuuuguucuuuauauuaaggugugguagaacuuuccuguguacuuggccaacuuuuccuuaaguuucccgcuuucaaaagaaugcucucugucuucccaaaagccaccauagcaaaauaauggaaacaaggcucucuuuuaccuugaagcuaugcaauggugccaggaaucaugugcguugauaaaccagaauucauaggauaauuuucuggauucaggauuagauucagaucuaaaaagacuaaggagcaggaucugccuuugaaauagaguccuuaguggugccuggaguagaaacaucuccuggccuguccuccuuccugaucucagggcugcacugggauuaauuaaucuuccagaugacuggucagcguuauuaaucccuaccucacugcuuuuugggcaacaaauuuucaccaagaucaagcuuaagaagaaauauuaggacuggggaaaaagguaacaaauacacuuuuuguugaguucuuuauagaauucuugaaaacuacccacagcaucauguuaaaagaagagagaugaaagaaaaaaauccccgcaaaaaacaaaaaagugcaguggagggggcugugggaggggugaaugaaaacagccuuaaagcaauaaaggaauuugugucauuuucaaagauuagauuuuucaaaagagucuaagacgauugacaagucuaguugucaaguaacaaaauuauucuaaagaauguagaggaaaacaucacaaagaacaaaacugcucauguacuagaaagaggagguuuuggugaaaguaaagugcuaagggggguauuaaaaacuucaauuccuugagacuuuuguuguuccuaugcaaaaucaauuaugugacauuugcagacaaagaaagcauuugcaaguaacaagggggauccauuagagguuuuuauccuuaguugauauucucacguacagcugauacgccuuuucuccuugaauguuaaaaauggcagaauuuccucaggacuaaggaccguuagccucuuucugagcaacugcgaagugacucuggagagauuccuggcuuguuugccaggauuccggagguagaagugaaaucugcgggugcacaccucacagagccugagcaaggauuugaagguacgccacuacccgcaaagaaaguugauaggaucucucuuccccuagguacgucucaaacuauugaaguaauuugcuuuucacacuagcaggacuggcaaugcucugcauauucaguucuggaguggaaauaagcgaauccccuuggcaccauggaaagucucauaauuauucauuucuguucauucccaagagugccuuuccugcacaagucugggugucagccuuuuaauaaagguguagcacagguguagguaaaaggaaaagucaagcaucaacaguuuacaguccuuagacauaaaaauauguauccuuuacuuccccaccucuugcuuccuaucaaacaaaacucaccacaacuauuucuggauuucuaggagguaacauuccguacaugcaucuugggaagaaaguacagcacaguugaaguuaaccaugggagaucacagaggaccaccacauaauaaagaagccaaagccugugaaugaagucauuccucuuuuuugcugguuuagcucuugacugcuuggauuuuaugccaccauauuuccaaacuaucccccacaaugauuucaaacagaaguugacaguuuggaaaagaauaguaguucauaugcaaauauggaauaugugccaggcauuaaggcauuuuuagagauacagucuucaauggggcucuuuaauggucuucauuuugccuucuccuaggucccucuucacccaucaucuuucaauaauuucacagcguuccuuugacuuaaaaaaacaaacaaacuaggaaacucuacuuauugaauuguucagaauauuuugcaaaggccaaaguaaguaacaaugaaccaccaucauuuagugaacauuugcacuacaaagcauguccaguuuuccaagagagucagcaguagucucacaauguccuuggcuaaaucuuaauucccaguuacaauaucucagcaccuggcaguucuuaggcuucaucagacucaacuguguguccccuggaugaguuauagaauuggaguguuagauaauccagcguaguggugaaugguugugccuauauaaagaaagggaauauagguagccaggguggauaucaaggaaaagcaacugaaugcugcuuuggggagcuccaaccagcucagucuaggcccuggaagaguuggcuguaucugaaaggugcaaauauguggccugaugcaguuuaccaucugucacucugcugccuccucccugaggauccgucugcugccauguucuucuuccuagguuacucuggcagaauggagaaugcugucugaauucaguuuucauuguggaaauggugggguggugauaauguuggggaggaggagauacaguuucauaagggcagguggggagucugcuuuguggacuguuguugcccaagcacaaugcuuggcacauaguagaugcucaacaaaugcuugcugaauaaaggaaggaaugaaaggaagaagaagaccugcuauuagaacugaaccacaugagaugggcaguggagacuggaauauuguguccaaggguguuggcagcuggaguuuggccuccuaauuauagaugugaagagaauuacggucugcagagggccuggcaguccuggugcugaccugccgaagggccagaucuugguggugacugcaacuucucugaguuccuuguuggaagcccccuucucuggcucugcagccugccaggcuuguggugagucauccugcugcugacucauuuggaccuuccucccuuuccgucagguuuccaaaucucaggcgugggugguuuccaaugggcuguguauuuccugagacccugagcggaggcagacaaugcuuauguaucuggagacacccuaaaacaccaagcuugcuugcguuggaagucuuccagaacugguuacccauauuuuaaagcaaagccucugaugcccgucagucccaggcugggacagugggcacacagaacauacuuugcugagcuuuccauucaaccaacuugauauuuucaggaaaaaacaugcuacaguguuauguagcaagucaauaugaacaugucucuaaugcucaaagacaagcaauaauuaaguugacugguuucccaggacugugcuuugucguaagacauaguuaaaaaaaaaaaaauuagucacagguauaaucccagaaaggauuaacaagggacuaguagguucuacccuaaguaaggaaccuaguauaggacuugacccuuuuccuucucuaggcacauaguggggucacuugauguuucucucuugauguuucucucuugagagaauggcgauuucaacuugacuuagaauuuuuuccgaaguguuaacgucagaccacacaaaagaauugcauucuguugcccuuaccauccauccaccauggucuuugauuaaaagaauaccauccccuuuuuucccuuggaggaacuccucccuuggaggagccaaauagaagccuccuguauuugaguaccuguauguucauguggucaauagugccugugaacaaagaagcaagcuaagauaucaccaucacuggacccccuucuucuucccuuuggugcuagaaguaaaccaguuguucaauaaaguaucuggaggugaagucuaacaguauuguggccauauuuacaucaaccuaccacaaacaacuggggauaugcgaguaguggaguuugucuuggacagucugagccggaaaaaaaaaaaccacuaagauuuauaaaaauaaaaagaaaauacuugauuucucacaugugcugaaugugcugauucaucuugguguaguguucucauauaaagugcuuaagaguuggacaguauaccuuuagacaucauaacuaacauaaucgagacguguuuacauuccuaccagggcauaauauugugaacacuuccacugagauugcagaauugcuguaauuuuuuuuuucuaaaacaucaugccaucugcacacauaauaaaauaauccaguaguugccaugcuaaaacaggacuucuagugaagggcacagacagcuccccaaagggaacuugaguuaugcacagugaugaaaacuggaagcaauuuuccagcuaauggucugccaaugaccacuuggaaugaguuggcauuauauuaugcaccucauuuuaaauccacagcaaagcaagauuuuuccaaaacccauaauauugacugaaugggugcuuuuuucaguuaauccaguuaaucuguccacgauccaaggauaucuucuggcagugccauggguuagucuuucugugaggaacaggccauguucauaucaacuggcaggacagcagcuuggaaggcuaaccguguuuauggagaacccucagaugauguucucauacucgguguugucucugucacagcgagaauccuugugcuuuugccagucuuugccaugcuugcagguggugaggagcacaacguccuccccguuauggacgugauauaaggcauuccuggugucugauccuaucccugucagguaccucuuccccuugaauaccagcauguacuuccugagaggagggaugguguugaacuucaaaaacccccucuccccuccuguccugggaugauccuuagaaaagaggggaauagaaacaucaaaguugggucggaaguuuucaguacugaugcuggcuuuggccagcaucgccuggccgaugucaaaccccacguccucgguguagucaggccaagugccggaauauaaauuaaaaauuaaaugauuccuaccauuguuccacaaguggagacucugcacuuuggaucucaaauugugcacauacugaggugacaacuggucucugucuaaaguauccagacucaggacaaagaggcacgccuggcugggguccgagguguagaaccuggagcccucgauggccgcuagaauguuuugguaacuuucggcgauuuucuccccuuuuugcuguggguauacguagacuuugaagccguuuuucuugcaaagggugaaaucgaagcaggacuccaugcggcacuucuugccuuuguagaugcuggaguuggcaucucgcuucugccggggggaaaugugcacgcuggaauccucguuuuccaauugaucccaaggaacgaaggggcgcagagcguccgggaagcggggccagaaaugauccggacugggguggugcaagccauuccuaccgcuguguucuucucuccggcuguggcuccucgaugcccuaaacugcaagccuccgaaauaaaacaaaagggcgagacaagagccagcugagagcaggaugaaauagcguuuuuuggccugcauguguccugccugggucaagaggauuguaaauaaacacaagaaucacccaaguuucccaaucaacacuuucagcuccaguccgccaucuucccgccuguaaagacuucaaacucuccgcucccaccuucucuggaugccuuuccccaagccguggacugauccagcgcaugugggcgauuucuuuaacuuucuccccuucggucuuucaucuuuggguugcacaaugcacgggagagagcggggcugaauaucucgcacccagggcgggcgagcagcggacuguaauuuucuugcaugcaacaagacggaggaaaagaaagagagaggggagaaaaaaaaagcucccgauacccaaucaauggcaagacgaagugauugccuugccucucggauuccucucggcagcguggaaaaugagccccgggaaggcaacuucaacucauccaccacucuccgugcagagcacuccgguuccaacaagucagccgaucccggguucagccggcuagugcaucuugcagcuggggcgccguaaccucacaaaucccugcaucucucuuuauucccuucugcagcggcuccaagacuccggcgguguuuacuccugcgcucgcggggccggcccccgggacgcgcggcggcccggcuggaggcggcggcggcggcggcgcuggguggcggcggcggcgcguccuccccgcgggcagugccggccccgagcagcgcuucgcaggcccccgcgcgaacgcugccgaccgccgcguucggucgcc

SEQ ID NO: 2801 - RNA, 3448 nt, Homo sapiens
cccacaauccagagagauccuuuauuaaaaugguuggcauauuuacuugcaguccuuuuuuucuguacauauaagaauauaugguuuuuacaaaauugggcuuauauuaugcauacaauuuuacacaugaccuuuccucccaccuuguaugacuuacguaauuucccauguugucauguauucuuuaaagauguaauuuuaauaacugggcauuauacugaaucuuaugaauuuaagcagaauuacuugauucuuuucacauugcuggaccucuagguugcuuguaaauuuuccguuuuccaaauagcacugugacagacuuucuuaucauaaucuucguauuucuaucuacuucuuaaaagaagcuuaaaagccuaucaguauuucacauucaaauuuaaaucacuuaguauaccaguaaauucaccauuggaaaucucugaggacaaaaugcaaauaaugcauaugagacaaacaauacuauuuuacgaucacuugaaaucuauauuuauccuucuagaauagucaucuuucagggagcacauuauuuccucuaggcaaauggacuauuacuagguuaaucuaaaugcaauaacaugaaacuuggcugacccagauuucuccaauaucgguaugcaugcaauuacaauauucugcagaaugacaaauacucaaggcucucaaaaacacauauuuuaucauccuuucauuuaaaacgauguacaauggacgcuaaaauaaaacaaauaaaguuuauagccaaugaagguugauagcauccaaaucucauguagacauaucaguuacauauaguguaacuuaaggcuuucuucgaauucuagcuuuauuuugucacuuccacaguuauugagaucuuaagugcucucaucauauugaaguuauuuauaauuccuguuaagaauuauauacucuuaacaguguaguuuuagauucacuauagucuauuauaaaaauuauuccacuuucaagaagcuaaaugggguucuuacaaucucuaaaguguguguguauaauacauucauguauaguaauacauaucuaaaauguuuuucucccacuaaccggugaaaagcaaaacaaaaauacaacaaaaacuccacuuauaucacuggucaucguaacuauugaaucacucaaaugcuaaagcgcccucacaauuggcgcaggugaagauagcuacagcuggacuguacaguugugcaggcugcacauuauacaacucuagugagugcaaucguacccugauugaugugacugguauucucugggguugugcaguacacaauccauacaacuguacgugaccaccuugaaguuagcucagguaauucuguuugcucauccauuacuuauuugugcauccuucucccuagugagcuaugaaaaaaguuuucaaagggaaguaaucuuaaaucuguauacuauuuucuaugauggaaauucugugaagaaacaauaacaaauucucccugacuccugucuguccuaauaguaagguggucuuucuucuaaucuccccauccauccacccaucaggaagcaauaggguaccuugugugaguaacuguagauuucugacuucuucucgcaccuucagcuggagcaccuguuguaagaugugcugccggagguucuccugggcaauccccauucgcucgagcuuuuugucaguaagucucagcagggcucgccuucucauacucgguguugucucugucacagcgagaauccuugugcuuuugccagucuuugccaugcuugcagguggugaggagcacaacguccuccccguuauggacgugauauaaggcauuccuggugucugauccuaucccugucagguaccucuuccccuugaauaccagcauguacuuccugagaggagggaugguguugaacuucaaaaacccccucuccccuccuguccugggaugauccuuagaaaagaggggaauagaaacaucaaaguugggucggaaguuuucaguacugaugcuggcuuuggccagcaucgccuggccgaugucaaaccccacguccucgguguagucaggccaagugccggaauauaaauuaaaaauuaaaugauuccuaccauuguuccacaaguggagacucugcacuuuggaucucaaauugugcacauacugaggugacaacuggucucugucuaaaguauccagacucaggacaaagaggcacgccuggcugggguccgagguguagaaccuggagcccucgauggccgcuagaauguuuugguaacuuucggcgauuuucuccccuuuuugcuguggguauacguagacuuugaagccguuuuucuugcaaagggugaaaucgaagcaggacuccaugcggcacuucuugccuuuguagaugcuggaguuggcaucucgcuucugccggggggaaaugugcacgcuggaauccucguuuuccaauugaucccaaggaacgaaggggcgcagagcguccgggaagcggggccagaaaugauccggacugggguggugcaagccauuccuaccgcuguguucuucucuccggcuguggcuccucgaugcccuaaacugcaagccuccgaaauaaaacaaaagggcgagacaagagccagcugagagcaggaugaaauagcguuuuuuggccugcauguguccugccugggucaagaggauuguaaauaaacacaagaaucacccaaguuucccaaucaacacuuucagcuccaguccgccaucuucccgccuguaaagacuucaaacucuccgcucccaccuucucuggaugccuuuccccaagccguggacugauccagcgcaugugggcgauuucuuuaacuuucuccccuucggucuuucaucuuuggguugcacaaugcacgggagagagcggggcugaauaucucgcacccagggcgggcgagcagcggacuguaauuuucuugcaugcaacaagacggaggaaaagaaagagagaggggagaaaaaaaaagcucccgauacccaaucaauggcaagacgaagugauugccuugccucucggauuccucucggcagcguggaaaaugagccccgggaaggcaacuucaacucauccaccacucuccgugcagagcacuccgguuccaacaagucagccgaucccggguucagccggcuagugcaucuugcagcuggggcgccguaaccucacaaaucccugcaucucucuuuauucccuucugcagcggcuccaagacuccggcgguguuuacuccugcgcucgcggggccggcccccgggacgcgcggcggcccggcuggaggcggcggcggcggcggcgcuggguggcggcggcggcgcguccuccccgcgggcagugccggccccgagcagcgcuucgcaggcccccgcgcgaacgcugccgaccgccgcguucggucgcc

SEQ ID NO: 2802 - RNA, 2144 nt, Homo sapiens; identical to SEQ ID NO: 2133

SEQ ID NO: 2803 - RNA, 1989 nt, Homo sapiens
uuccuuuugcuacaaaaugcauuuauuuccagucagacaaaauucuugaacuguauauucggguacauauuauaaggucaucuuugauauaugcccuguuuacaagauccauuucuaauuauuaaagugaauaucaaacacacaucuuugcaucuuaaaacauaaauaaacugcuaauguuuauaagccacaaaucuggucacugacaugaguggccugcaauucuucagugaugagcacacggcgauacagacaagaucagauuacccagguaggcaggcagcaggcaccuguaauucacccgcugacugugcuguuguggcagugacccuucuugugaaaaaagaguuaugugcagacaaaagugugacauaugcaacguggagaggcauuucacagaaugcaaacaccauucagguaaauuaguagacuccagaaugaaugaaagcuucaugaaugcaaaccuguuguuuacaauacugggcauuguggcaccuuuucacuggacaguuuaauaaauaucuauuaaagaaaguaaggauaagagaagaagcugaagcagucgucuuggugcacaacauauuuucaagauugggcuuuagguugugaguuucagagauaccauuguuuguuucuucagaguaaaucauucuauuuggaaagcccuucauuuccuuaaaaagaccuuuaaauucuucauuagcauuaagagacuucuuguagacugccaggaauugggguucauuggcuuaaagaagagcacagcacaguugacagaacgucuugguuugucucuugaauuaagaagccugauuggcucagaauuucucagaucuacuuuauucuucacacuuucccuccuuuuggcuccuguuaacaucccaagcccacagagacagacgcucauagguggagcgguauacuucauaaaaucucauuucauuaucaacuauuucuagugccauggcucccucuggacucuaaauaguugauaucugaaaguuccauccuucacagaguucuucacuugcuccuugaagguaagguucuuguucuaaggcugaugcugggaaggucccauagaggaaauuccuggagaaucucuauucccuuuggguucucgugcccucucucucacuccccauaaggcuaugguugcaauucuggagacacauaggaaaaguuucuaaacucauccugguuaaucauuggaagaugucccucaucaauuggaguuaaaacuggcucuuccuuuaugaagucagggucaaaauuacugacaucuucucgggauuugauucugggucugaaaggcgguucuauuuggcgaugguucagcugggcccagucgauuuccuuaaaaaaaggaugucucaagauggcgugcucgccucccugagucaggcugcccaagcgcauggugggguucuuggucaugaaagauuuuaggaucccuguggcaucuucauggagccagguaggguagaccaccucaucauucaguauggccucaaagaggucaucuucguucucugccucaaaaggcgcgugaccacagagcaucucauagagcaacacgcccauugcccaccagucuacugcaggcccguacagcauuuccuggaggaucucuggagcgauauagucuggcgugccacagaauguggccguggugacaccauugcaaauccccuccuugcacauuccgaagucugccaguuuacagugacccucgugguccaacaggacauuguccaguuucagaucucucccaugguuucugcaccuucauuuccaaaggcaagugaaaacagugccaggcugcgcacauggguuacuccagggacuucucuucccguuuccccuaaagcauuugacaguuagaucuuggaacugaguccagcagcacugaggucagagagauggcuaaagcuaaaagcaaacuggaugcuguucaggagguucuccuuugucauuuuuaucuccaaa

SEQ ID NO: 2804 - RNA, 958 nt, Homo sapiens
uucagucagagugggauccauuuuuuaauuacaaaaucuaacaaaauaagcacauucuaaauuaaguuccugcuugugguccauugcaccauugaacuggguggagagccuuccacaugaugauucagggacccaggcuccuucugacuugaagugcagccauucccuggggcuucacaguccuggcuggauucuuuaucucgaaaaucaauuuccaccaacccaagcucaguauucauucauagcaggaagcuggauucagggugcuuuuccaccugaaagccaaaauagugccacauuucugaucaucuagauuauucaucaagugagggauuccacaauacauauuauuuucugcgaugccugagugugccuggaaaagaguuuugauggucaacuccagugaguugguugcaaauauuaucuuuuacuuggaccucagagccaucuggcauaauugagacugcaccacugcacuccagccuagggacacagcaagacccacguucucuuccuccgaugcuugauuccacccgggguucacaauaagucugugcaauguguuuguugaaaaacugguucucacuuucuuccaggugugcaggguuucugagccaggagcaguugaggagugggaagaacaucuggaaagacugggaguaaggacgccccaucugcugcuggagccaccaggagccaggcugcugcucucagaauggggcagacuccaggcauuaaucuucagcuccugccccuggaaccagaaucgucgaaacaaaauuuucaguugcugugaguaagcaggcuguuuacuuccagccacuucuuucccauucccauggcuuuuugagugccagaguggggugcucaaggaagaauguuuggagagaaagggauugagauugggggaaagggcaggagaaaauaguguuaguucacccaacacccuuccuucaag

SEQ ID NO: 2805 - RNA, 1021 nt, Homo sapiens
uucagucagagugggauccauuuuuuaauuacaaaaucuaacaaaauaagcacauucuaaauuaaguuccugcuugugguccauugcaccauugaacuggguggagagccuuccacaugaugauucagggacccaggcuccuucugacuugaagugcagccauucccuggggcuucacaguccuggcuggauucuuuaucucgaaaaucaauuuccaccaacccaagcucaguauucauucauagcaggaagcuggauucagggugcuuuuccaccugaaagccaaaauagugccacauuucugaucaucuagauuauucaucaagugagggauuccacaauacauauuauuuucugcgaugccugagugugccuggaaaagaguuuugauggucaacuccagugaguugguugcaaauauuaucuuuuacuuggaccucagagccaucuggcauaauugagacugcaccacugcacuccagccuagggacacagcaagacccacguucucuuccuccgaugcuugauuccacccgggguucacaauaagucugugcaauguguuuguugaaaaacugguucucacuuucuuccaggugugcaggguuucugagccaggagcaguugaggagugggaagaacaucuggaaagacugggaguaaggacgccccaucugaugaaauuugacaaguuuccaaccagaagaagcuucauaagaaaaaaacagauaugaaggcugcugcuggagccaccaggagccaggcugcugcucucagaauggggcagacuccaggcauuaaucuucagcuccugccccuggaaccagaaucgucgaaacaaaauuuucaguugcugugaguaagcaggcuguuuacuuccagccacuucuuucccauucccauggcuuuuugagugccagaguggggugcucaaggaagaauguuuggagagaaagggauugagauugggggaaagggcaggagaaaauaguguuaguucacccaacacccuuccuucaag

SEQ ID NO: 2806 - RNA, 1507 nt, Homo sapiens
guguugcaaagccuuuaauuagaauguuuguauuuuuuacaucaugcauaacuucacauuugugauuaauuaguaauuauuucaauacuuguaagcucaucugccucagauuuaaucauaauacaugaauuaaauuaaucaaauuaaggaacagcaauuuagaaagaaacacacuuuaagaaaucaaaauucucaauucaggcagucuguuucuaucauuugguauucuacuccuuuaaaaauuucauauugcccaacaaaaagugguuauuuuuacuguuuuuggagaugacugaacagaugaaggcaucagaugccuucaucagcugguauuuugccuaagaucuauuuaagauaaccuuuucuuauauuuuuuacuuaauauugggcauaaucguaucauucaagauuaagucuggguuauuucuuugauaagaacugaauguggccgggcgcaguggcucacgccuguaaucccagcacuuugggaggccgagguggguggaucacaaggucaggagaucgagaccauccuggcuaacacggugaaacccugucucuacuaaaaauacaaaaaauuagccgggcgugguggcgggcgcccguaaucccagcuacucgggaggcugaggcaggagaauggcgugaacccgggagguggagguugcagugagccgagauugcgccacugcacuccagccugggcgacagagcgagacugucucaaaaaaaaaaagaacggaauguacuggagauguauuugauaaccaagguuuuagguaaauuuucaccaguauuaguucuauuugcaaacugaaaaauguuguaggcuuaauguaaaauaaccacauuagugaacauuauaucucuuagaagaaaggccauauuuugcuccugcuucuguaaaaauauuauuuguuugaaggggaaauaaugguagugugaccuuucacuuaauuccuacucccuuaaugugagagagacaaaaugagcugaagaaggaaaauucuggaguuacacuccacaaccuugaacauacugacggacaucucuguuuugacaacgauuucuccaugccacccaugcucuaaugccuuguggaucacggacaacccucuuugcacaagcuacagcaucagcgauguuaucuugcagcaaagcacugcaggauaaaugacaggcauuaacugcuccugggguuuugccaucauuacaccaguagcggcuauugaucugaaauaucccauaaucagugcuucugucuccagcauuguaguuuguagcucguguguuguaaccacucucccauuuggccaaacacaucccguccgcccaggugcugagagggagcagggcgcgggucggcgggcgcgaacccccagacuccgacccgcgcuggagccccuacuuggagcagaucgagucucagccgcugugccuacaaggccucucuccggcccgaaucuuggaaaagcacuuccgggggagcgggggagggaaggguuuu

SEQ ID NO: 2807 - RNA, 1603 nt, Homo sapiens
guguugcaaagccuuuaauuagaauguuuguauuuuuuacaucaugcauaacuucacauuugugauuaauuaguaauuauuucaauacuuguaagcucaucugccucagauuuaaucauaauacaugaauuaaauuaaucaaauuaaggaacagcaauuuagaaagaaacacacuuuaagaaaucaaaauucucaauucaggcagucuguuucuaucauuugguauucuacuccuuuaaaaauuucauauugcccaacaaaaagugguuauuuuuacuguuuuuggagaugacugaacagaugaaggcaucagaugccuucaucagcugguauuuugccuaagaucuauuuaagauaaccuuuucuuauauuuuuuacuuaauauugggcauaaucguaucauucaagauuaagucuggguuauuucuuugauaagaacugaauguggccgggcgcaguggcucacgccuguaaucccagcacuuugggaggccgagguggguggaucacaaggucaggagaucgagaccauccuggcuaacacggugaaacccugucucuacuaaaaauacaaaaaauuagccgggcgugguggcgggcgcccguaaucccagcuacucgggaggcugaggcaggagaauggcgugaacccgggagguggagguugcagugagccgagauugcgccacugcacuccagccugggcgacagagcgagacugucucaaaaaaaaaaagaacggaauguacuggagauguauuugauaaccaagguuuuagguaaauuuucaccaguauuaguucuauuugcaaacugaaaaauguuguaggcuuaauguaaaauaaccacauuagugaacauuauaucucuuagaagaaaggccauauuuugcuccugcuucuguaaaaauauuauuuguuugaaggggaaauaaugguagugugaccuuucacuuaauuccuacucccuuaaugugagagagacaaaaugagcugaagaaggaaaauucuggaguuacacuccacaaccuugaacauacugacggacaucucuguuuugacaacgauuucuccaugccacccaugcucuaaugccuuguggaucacggacaacccucuuugcacaagcuacagcaucagcgauguuaucuugcagcaaagcacugcaggauaaaugacaggcauuaacugcuccugggguuuugccaucauuacaccaguagcggcuauugaucugaaauaucccauaaucagugcuucugucuccagcauuguaguuuguagcucguguguuguaaccacucucccauuuggccaaacacaucccaagcugguugacaugccacagcugcaucuuacuuuaugacaaauggacuguuucaucacuuuugcaucugggcaucuacuucuuaauggucauuucguccgcccaggugcugagagggagcagggcgcgggucggcgggcgcgaacccccagacuccgacccgcgcuggagccccuacuuggagcagaucgagucucagccgcugugccuacaaggccucucuccggcccgaaucuuggaaaagcacuuccgggggagcgggggagggaaggguuuu

SEQ ID NO: 2808 - RNA, 2647 nt, Homo sapiens
ucauccacaacauccccuuuuuauugauauuaaucacaguuaugaggucuuguccaucagaaagcacaauuugcauuauguagaacuacauacaaagacauaaaaauaaaacauacauacaccaaccaccacaccaguuaaucucaaccaaucaaaccucugaaugugucuucaauuuugaucaucagugcuucggaagaacguacauagacccagcccaagguuggccuuuggggucugauagcauucacagagcaggagauucacccuuggaagcaauugaauguguaaacucugagagcagacacugacaaugcaaugccugcauaccugacuccugggcugccuuccuucucagcagagcccacugaaagucucacgugugccuuuaaccaaugaggauggcaggccuuaucuguguuugaaguggacaggucauugcuaccccuguuggagaagcuauguaagaaggaguaggcuggcuucuggucuaguucgacucauucuuuauagggacauuucagaaugaugaguuggcuaaaauuuacuuuaaaggggaaauguaaaauuaccucuucuuuuccuauccccuucuuccuuucccauccugagcccucuggcaaggccuguugcagcucaagaguuuuugucagauuauaaguuaccaaauggucaacagggaaggacccacagcagauuccaaaacucuuucauucacuugaguuaacugaaauggcuccuucuuugaguaauugaagaguuugaguucuagcaguuugcuggugucuccaagucucuuagaaacaugauggcuauaaacuuaucaaaauaaaugccuaagaaauuuggaaagcgcgacaaauggccuugcuccuggaauccauugacagcagaggccuccgaacaaacccacacucugucugucucuucuuuccacagggcucacugugaguucacaguuguccucauccccuuuccuucaauaaugucaaucuuugccuuuaaaaaaaaaaaaaaaaaaagccagacuagccaauuuccuucccuuuuucugugucccccucccauguaguaucuccuuagggggagguaaaggaagacaugcuccucucugggcuggcucggccuuggaagguagcuugcuaucuuuaugaugcuccaguuccaacauucuagauggggagaggcucagcagugauggagcaggaggggcggaugagaggugugcuggccacucugcccugagucacuaggccaccaaaaugcuuaggagacgucuuuugguagcucgcuucuauaggugaccuugaggaguugggaggcagauagaaggucccgaaguggagauuucccugaucugaaguuccuugauaaucccacugaagagagaguccauucaguggccaaaacaaagaaucuguauuuccaugacaccuuaaaauuccccauuaaaucaaaaaucucccucaaagcaaaguaaaaaugguucuauuauaaucagagucaaucaggauaaugagaugaagaagagaggaaggaaaaaaguuuuaaugugaagaaagaagcuuguugucccauagaagccaaccacugcuguuucuucguauggccuuucccgggguccgaagcgucucagcccuagcccaggccaacguccagugacaucaucacuacaaaucccaggauggaggcccaggaugccaguuucccauuaccacugaucugggcuucggggaugaugucguccaugaccacguagaccauggcaccggcagcaaaggccagagcguagggcaggaugggcucagccagcaccacggcaaaggcaccaaagaccccggccaggggcuccaccaugccgcucagcugcccauaccagaaagcucuccagguggagaagccugccccucgcaagggaaggcugacagccaggcccucggggaaauucuggaucccgauuccaauggccaaauuccuggcacucucaaagguagcagaugccgucuuuucuauagccccaaauccaacuccaacagcgagacccucuccagcuuggcgacccagcuguuaagcagaacaaaucaauccacggauggagaagaggucgugggucuucugagcccagcugauacacaccaaguaauccacguuaagggguccgcagccccccacccaauuccccacuuuccauccaaggccaaagagcagccagacccuguccucugcgcuccagacucgcggaggucgcgggcggggguccucaggcggccgccuucucguccccaggggugggcgcgcgacgcgggcagggaccgggcgcccggaggaccaagcgagcgcaucccgccuacucgugcugggacaucacccagccuggacgccgcuccucgccuuucuuccccgcgcaucgccagcgccaaccaaagauccccgccgggaaagccucucugccaagcuggaaagcgcugaaggcggaucgucucucagacuuggguuugcagguucacaaggcccgggaggcuuacggugggcgccugccuaacagaggguccuugcggagaagcgcagaacgacaaaugccagaggcggugaccgcguccucuggauaccagcgccgcaccgcgcacccgcgccgccugcgcgcccu

SEQ ID NO: 2809 - RNA, 2577 nt, Homo sapiens
ucauccacaacauccccuuuuuauugauauuaaucacaguuaugaggucuuguccaucagaaagcacaauuugcauuauguagaacuacauacaaagacauaaaaauaaaacauacauacaccaaccaccacaccaguuaaucucaaccaaucaaaccucugaaugugucuucaauuuugaucaucagugcuucggaagaacguacauagacccagcccaagguuggccuuuggggucugauagcauucacagagcaggagauucacccuuggaagcaauugaauguguaaacucugagagcagacacugacaaugcaaugccugcauaccugacuccugggcugccuuccuucucagcagagcccacugaaagucucacgugugccuuuaaccaaugaggauggcaggccuuaucuguguuugaaguggacaggucauugcuaccccuguuggagaagcuauguaagaaggaguaggcuggcuucuggucuaguucgacucauucuuuauagggacauuucagaaugaugaguuggcuaaaauuuacuuuaaaggggaaauguaaaauuaccucuucuuuuccuauccccuucuuccuuucccauccugagcccucuggcaaggccuguugcagcucaagaguuuuugucagauuauaaguuaccaaauggucaacagggaaggacccacagcagauuccaaaacucuuucauucacuugaguuaacugaaauggcuccuucuuugaguaauugaagaguuugaguucuagcaguuugcuggugucuccaagucucuuagaaacaugauggcuauaaacuuaucaaaauaaaugccuaagaaauuuggaaagcgcgacaaauggccuugcuccuggaauccauugacagcagaggccuccgaacaaacccacacucugucugucucuucuuuccacagggcucacugugaguucacaguuguccucauccccuuuccuucaauaaugucaaucuuugccuuuaaaaaaaaaaaaaaaaaaagccagacuagccaauuuccuucccuuuuucugugucccccucccauguaguaucuccuuagggggagguaaaggaagacaugcuccucucugggcuggcucggccuuggaagguagcuugcuaucuuuaugaugcuccaguuccaacauucuagauggggagaggcucagcagugauggagcaggaggggcggaugagaggugugcuggccacucugcccugagucacuaggccaccaaaaugcuuaggagacgucuuuugguagcucgcuucuauaggugaccuugaggaguugggaggcagauagaaggucccgaaguggagauuucccugaucugaaguuccuugauaaucccacugaagagagaguccauucaguggccaaaacaaagaaucuguauuuccaugacaccuuaaaauuccccauuaaaucaaaaaucucccucaaagcaaaguaaaaaugguucuauuauaaucagagucaaucaggauaaugagaugaagaagagaggaaggaaaaaaguuuuaaugugaagaaagaagcuuguugucccauagaagccaaccacugcuguuucuucguauggccuuucccgggguccgaagcgucucagcccuagcccaggccaacguccagugacaucaucacuacaaaucccaggauggaggcccaggaugccaguuucccauuaccacugaucugggcuucggggaugaugucguccaugaccacguagaccauggcaccggcagcaaaggccagagcguagggcaggaugggcucagccagcaccacggcaaaggcaccaaagaccccggccaggggcuccaccaugccgcucagcugcccauaccagaaagcucuccagguggagaagccugccccucgcaagggaaggcugacagccaggcccucggggaaauucuggaucccgauuccaauggccaaauuccuccagcuuggcgacccagcuguuaagcagaacaaaucaauccacggauggagaagaggucgugggucuucugagcccagcugauacacaccaaguaauccacguuaagggguccgcagccccccacccaauuccccacuuuccauccaaggccaaagagcagccagacccuguccucugcgcuccagacucgcggaggucgcgggcggggguccucaggcggccgccuucucguccccaggggugggcgcgcgacgcgggcagggaccgggcgcccggaggaccaagcgagcgcaucccgccuacucgugcugggacaucacccagccuggacgccgcuccucgccuuucuuccccgcgcaucgccagcgccaaccaaagauccccgccgggaaagccucucugccaagcuggaaagcgcugaaggcggaucgucucucagacuuggguuugcagguucacaaggcccgggaggcuuacggugggcgccugccuaacagaggguccuugcggagaagcgcagaacgacaaaugccagaggcggugaccgcguccucuggauaccagcgccgcaccgcgcacccgcgccgccugcgcgcccu

SEQ ID NO: 2810 - RNA, 517 nt, Homo sapiens
uacaggaacagccacaauguuuacuggugagaaagucaguagggugacaguaacuucuguaucuuuaggaggguaacaaggcuuccacuuccaaauucaagaaaggcucucucaucucccguaggucccauguggugcggcacccaagcauucucagaagcacccuuucaaagagaaauguagcaccaaaaaauaguauguaacauaaaaguccagugacggugaggacaucaaacaugaugaaaauccucagugcacguuuccugggggguggagagccgccggcacuaguuccaaaaguucugguccaccuccucucggaguucaaagccccagcacuccggcccggccgccagcucgcagcacacgaguccuuccccguccuuuccccacccugccugcacuacaccaugucaggaauccgggcaggcaccgagcugggagcugacaucacucccaguuccagguaccucccccucccacugccgcccuucucuccucccucccugcaggaauc

SEQ ID NO: 2811 - RNA, 3538 nt, Homo sapiens
uggagggagcagagcgcacaaacauuuauuuacaaaagucccaguuacauaugauacaggcuuuuuacacacaguaguugaaacggaauuauuuuaucuauuuuuacuaccagaagguaaagaaaaaguuuaaugaacuaaucguuucuuguuuuuauacaaagugacagaucaugcacauuuuuuucaguuuuuaaauauuuugcuaagugcaaauacuagauuccucucuccaguuuuaaggcaaguaagagggggcuguggcuggggagccucacgcccugcggcaagcccugcagggcagagagagggagccagcugccucaggguugccuguugucugaccugcucucugggcacuggcacggccccuugcuggcuggucugaagacccccagugcuucucuccccaaugcugucacugguccaggcaggagcccgagguucaggcccugccucuggacagaggggccuggagaaccagggugggugcucacggcagcccuguggucccccgugccuggcucggggaggauccucaggaaucagggacccuccaaggaaagaggccgccgcuccuuccccaccagcccaguguggccagaacagcuggaacuccucucaaaugacccaccccugggguuuggccuuaggagaaacaucacucugggcucccccuccccugccaggguugaggccagcaccugucuagggcuguuucugcagcugcugccugcucccuuuguccugccuggggcucuugcuggagccacgugccuaggguacagggcagagggagcugaggcucccagggccugaggucaccucuucagcugugaugucuacagccgcccucugcucccagagauccucccuggggaagcacagggagcauauuuaagguaccgaagacaauccuguugcugccgcauggagccugccuuuccaaggcacugucguucaggcuaguagcaaaguucaggcaguccaacagguaugggcgccagcaaggacauagcagcaggcugcccccaagcccggccucccugcgcacccuuaccccagguccaggugaccaccugucuucaaagccuccauccugggcaaaggcagaaagaauggguaucuuaguuuuuuuuuuuuuuuuuuuaaagauagaguuuugcuuuuguugcucaggcuggagugcaguggcacaaucuuggcucacugcaaccucugccucccagguucaagugauucuccugccucagccuccugaguaccugggauuauaggcaugcgccaccuuguccggcuaauuuuguauuuuuaguagagacggggacucaaacucccgaccucaacucauccgcccgccucggccucccaaagugcugggauuacaggcgggagccaccgcgccgggccaucuuagaucuuagagcccacuuuaguccuugaaauacaucugagaagccaauggcagcgaaugacggugcccgccugccccaggcaccuugggugggccaggcccugcuucaggagguggcgggccacuccggagacugaugcagccccaccccaaugguugucggacucagcugugucugaggucugugaacucccagccucucagaaccccauggcaacacgacaaggacaaggcagggcaugaggaggaggagaaagugaugccuguggccaggaaggcuucagaccucucaucugucaaugggccagagugaugccucaggcaccgcuagaaacccagggccggacaggaggcgaggagggugaguggggacauggcagggcugagcugaugcucagcugacuccaugagaagggaagugaccuucacaugggggauacuggacagcacccucuaccugccuucagcaaccacugagaacacccggggcacacacggggcagggguggcacccagggucaccugucucccuaaggaggcccacuccucccccagaaagccaggggggaaaagcugcucaucacccaggguggcagaaacgucucccccagcaguugggcugcccagcagggccaccaggccucugucccagcugccuuaagaggcucuuucaaugggccagcuucagaaccauccaguguaccgcagcggccuggccugggaaaggauuucucagccugacuuuccagagaccgaggaugagaaaguuaggcggcaacagaacaaaacccccgccgcgagaugggucugcugcugccucaucugaguagguguaagaggggaggagaggugcccucaacacucacugcaguggcgcacggguuuuggauggggggacagcaucuuggcccucacagcuguggcagugccucugcgggccauggucccagccccccacccugagcaaugcuucccaggcccgcaggugcagcccccucugcccuuggcccaaccgugggccccuccagggagaugcucucggcugccuugcuacccaggggucggcuccgaggagaggcccaggugugagcagcagggaccuggucuauggccuaugccauggacaaggcagaaggacugccguugguggccugggggaugcgaggggaggggcaguucacaucgcagcucucuccgaacuccaccauuugggacgucuuuauuauggauccguccacucuuccaggagcaguagcccuucuaggaaaggggugggaagaaaaccagccuacccuucaagcugacuuaggaugcaaugguacagacaccagccuugggggaggguucuccauccacacuccuaccccaaacgggcuuugugcugcucaauggggauucggggccaucagaagcgaugccgcggcugggggccaaagugcaugggcagguugugcuccaggggcauguggaugggaccgaagucauaguugacccgcacguugggcagagggggcacguacggggcugggauaggccccauguugagugggaaguuguugaacacaggccgcacgggaggcagggggaagggugggugcgcgaaggcauaggguggcaucuguggcuguggcagguucugcggaacgggccucgggagggccuccacccucugcaccuucuccacaggcuucuccagcggggguccaaugcguuugaagguguucucuccauucuuucuuuucuguuccucuucagccuccuucuggauuuccucaauaagcuucucaucaucuucagugggaucgguccagagagagcaucuugaacacuccuggcaaggggcuccuggugagcggggauguuggcagaaauggucauauccauuaauagaaacucgacagagguagcacaucugggcaccacagcggcaagacaugcgguugcagccuucagauuugaugaggccagucccacacuuguggcauuuucuaaugcgggcagcagucauuuuuucuucacuggcgcggcuggguucacggcuccaggcuccggcgacaacgacuccggcggcggccccggcucccggcgcagcuaggcgccccugcugcccgccaucccgcggcc

SEQ ID NO: 2812 - RNA, 8519 nt, Homo sapiens
ugacaggucaaugaagacacaucuccuuuucacguuuauuucauuuuguuuuaagaucacagaagagcagagcauucauacguguaaaguaacagaagagagaaacagaauuuaaauacauuuaaaaagaaaagaaaaaaagcuuuuuuucauuuuaauuuuaauuuuuuuuuuuuaacacacauugcgcuuuuuaucuccuucacagagcuaguacccagggaaaaaaauccaccuaauaaacaaaaaugaaaaaccuugaaaaacaaaaaaucccaaacaaaaaauggccauguguuuguaucuucaagggaagaucaguucaugucuacagggcugaaaaaaggaauauauuuauauauauauuuauauguauauaacacuguuaauaaggagaauucuaaccaagagcaggauuuauacacccuucaguagagcagugauaaggaagguggggagcauugggagaugggggagggaguuggaaguguucucuuuugcuucucucccccugaauuucuucccuuuaaccucccuacuccaaguaaauacuuagggagcagaacuuggccacaguucaccaggaugaacaauuuccauucucuggugaagagcaaagacuuagggaaguggguucaaaagaggcuccugguagcuugggauugcugcagcgugccaugaagcuaggacuuccauggguuuucuucacuugcaagaagcauauuuguacugugccuggcuuuacauagggaggauugugcagaguagaauguggcuguagaaguagauccaggagcacugcccaaaaagagguacuucugaaaugaccaugaaaacggggaguugucccauggacaggucauucucccacuuagagagagcuucauaaguaaucuaagcacaucauauauccuuaccuacacaaagugaugugauugcugggaagugaugaacaaacccuacucuucagugacuggaaacucugaugccuucuguucuuucagacaauaaaaucaaaggacaacuuuggauagaugcuaaccugagccucuaggacagcuuaggacaagaggaucugugcucaaugcaucuagaacauggcacaagaaaauaauuccuuauuaauugcuugagaaaucauccuuucugcuuacccuuuucucagagaaccuaacuuucacauuugauuuuggccuucacaacaauucauacugucuucaacucuguaaccuccuaaauuguguuuauuuuuguuuuauuuucagcuugucuucuuuaaauagaauugacuuguacuuuuugaaaacaauacuuguuuucucuccaucuauuugcuuuauuucauagccuauaauucaagcuuugggaaacuuaucccaugagaaauuccuuccaaaacaaaauguauugucuugcccauuucuuacaguucagccuuugaaccugccugggaccccaugcuuaccgccaucagcacaagcaaagaguuuccaaagacacacauuuacuguaaugagguacuuggcccaggaugacagaaaacuaauguuuccuuucuuaugcacaauguccucauuuguuacaugcauaauacccagucuggcuauuuuccuuccuaugaaagauuauuagaauauaguuccacauuuagguuuuauaauauaaacaaggaaacaaccccagcuaugucaauguccuuaguguaauuugaaugugucccuucucuacacugcuauaaaguuuugaucagaaaaaauuuacagacccaguccagagucccuguauucuagcaguuuuggguuuagaaaugaagacgguagaaugauaguucugagaagugaugagaauacagagaccaaacuagagauaacaaacagcugcuguuuacaaacagugcugggcacagcacuaagugaauauuaaauucuuauucagaauaaagguuagaguugaaagagauuuuagagacgucagccgaaucccucacuuucaggaugagaaaaccaagacucaggaaaguuaaaugacuugccaaugucucacagcuuuauuuguggcugaacuugggguuagaacccaauucuccugacucccaauucaauacaccuucuaccucacuuuaaaguugucaguuuaucuuagaugaugaggaagcaguaccaagaagacacuuggggguugauacaacaggcacaugagcccuuaaaacuccuuccuguuuuuuuucuuuuuuuuucucuuagguagauuagugcauuuaaagccugaaguuaauuugaccuaaaauuuuuauaagucuuugcagaaaguucacuuguuuccugaaaucaucuccuugauaauuuuuuauguaacaguuguucauauuguaggaaugauauauaugucauccuguuacacgugucaggcacuucaaaaagacuccaagagaacaugccugagaaagauaacucccaauuaaaaaugauucagucccucacuugcaauauucaggauaaauguguggaaacauuaggcuaccagauaaauaaaagguaguuauuuccuagggugacucagcaagauauuucucgaggauauaacauuuuuuauauugcacaauuucuuagaauccagauggcaagcuuucccacugcuuuuguugaauggaaaauaaaaacugaguaauauuuugcucaucaagguuuaggucacuuccuuggagcuauuuaaauaagacaucuuagauggugagaaaggaguaaaaagaagauagcugggaguggauacagcagacauauagcccuuaaaaccuuucccucuauuucccuugcuuuggggucgggugagacaacuacagcaacaguugggacaaucuccacuuagauccugaaagaccaaagaggugacuugagcaggauauaaaccuugaacuguuccugugggucugcuuccuuuggcuaaggcaaccucauauuuggagcuuuagucguaauucuuccgauucugaacugugaaacguuucaguuuuuauuuauuuuuauuugauuuuuuuuuccuuaagaaucauaguaaaccuuagcaguaguugggcacugcaugaaaaaugaaguuuacauaguuuauauuauguacauaaacuagugauuuacauugauuuacacaugauuggugccuaauuuauuaaucagcacgcagcauguaaaugugcucaaaagaaaucaagguuuaaaauaaguuuuccauaauauucauaaacauuuucgcugguguaaauguuaaaccuaaacccaacguuaacaccagcuuccuugccaagagaaaagugagauguacaugcugggugaaaacaaauucuuuccuaaauuuugguuggcgacauuugaacagcauagcuacaugcaaaugagaauaguuuacuucuuuucugcuaguaugcacauaaauguaaacuccauuuugcauuuagugagauguuuacagauauuaugccaaccaugauggaaaauuuacaucacugaggcaaaugcagucuuuggagaagaaauauucuaaacauuuaagcaaggaggaggcuuccuaaacugcauuuuuguuucuuaucucaccauuuuugugguguguuucacauuugucuucaaaauauuaauaguuuauguagguaagauauagcacuguacuuacauuucucuuaaaaaaugauauugguaaccaagacuaaaugcaggcuaaaaguguaugaggaugaaaagaaaaaugaggacaugguuaaucccauuaaacauagucuauaagcaaauuucuuuucgccaaauaauuacaaaacggaaaaaguggggcucuaugucuuucuacgugagcauagauuuucuuucuaaacaaccaaauucaguacuuuucuuccuuuuaagaucaaaacauuauucuuaauuugucuuauaauacauacauuauuguaaauauagcaucuauaaagauaaaaaauacacacacauauauauuauuguuuuccacaaauaauucgagcccugcaaagaacaaaaugaaaaauucagggagaauagccaauagaaacagugaaaccacaaccaacucagggauggaaucugcgacucuggaggauucaagaagcucacaacuugguaaaguaauaacucaaacaauuucaugcugaggaguuuagcuuuugugugcaaaggagguaaguccauuuuuggaggagaaacagauuuuuguuugguccuccaagaacgugaaaaucacgaguacuuuuacaaggucucuauaaguagccccaguagucugacuauguaguaaaaaaaugcccauggcaagcgagaagucugucugacuuggaagagaaggcaaaggucaauggggcaguccuuccugagagaaaacccaucugcuuuucuauaagccuuaguucuuuuaagacauggggauuucaugucucgaaacaaacaagacuuuuuauccagcaaggcaaaaccuuugcucaacaauugcacagagcauaauuacaauucugcaguuguaaagcccuggauaguucucauucuucaggaagcacccugggucaaagucauuucuguuuuuguuaacugaaaguugggucuaaggauuuccuuuuacgaaugguggaguuuuacuuuguauacaaaggauauuaaauauauuagccacucagauuaauugaugaauuucacuccucucaguauauuauuuccaaccaguuggugcuuuucagugcgggguuucaaacuuugauuaccaagggacaagauucuugaaggaauuuauuccaauaugauuaacuaaauuccaagaagucuuauguugagauucaaugauuucuuggugucaguccucuggcccuaccuuucccugacuuuucucuaaacuauauuuuccuccauuguucacacugcuuagggaacacuuucaauccuaugaaauuucuggggacaauguuuucucugaaacaggaaccagaagcaaauuuuuaaaauuucaagauccugcuagagacacaggcaaacaccacauuuaaauauauguuuaauuauguuuaauauaugguccauuauauuaaaacugagggaacaaacggugcugacauggcagacauuuauuucaauggagaaguuccucccaugaaaccaagaccuuguccucaugauaaaguggagacaauaagaaagccagguauauaauuaaggccugugacaugccauggggaucuguuccugaagguaauacuaacauccaacuucuaacaacauccaacuuaacuccuacuuuucucuuccuguauaucuuuaaauuagcaugcgcuuuucuaaagccacacacuuaagugugugacugccucuucaauuuuuggggaaugcuuauuauuaaagaugauacccuuuauucuugaacuaagaagaccaaacuguuaagagaaauaccugauugucaauaaauugaugcugcauaggaauauggcucaccuucccuauauuuuacuagcuaccuucuuggaugagaauuuguuuucucuccuaugucagaaucugcuauaaacacucuuaaccauccccaagcugaauuuuuccuuguaucaagucuaaacugcaaaaucaugaaagaaggcugugauaagcuucuaaaacaaacaauaaaaucccuuagaagaaauugaagaaauuaacaaugcuacuuagaucuuucucccuccugccuuccuuuccuuucuccuuccuuccuuccuuccuuccuuccucccucccucccucccucccucccucccucccucccucccccccuuccccgucccccccucccugccuuccuuccuuccuuccuuccuucuuuccuuucuuuuuuuccaguuacaaaguuucucauuuuauaacauggaacagcuauuuacaagguuccaacuuaaugacauaccauauuuggcucugcaagauuacauucaaauauaaucucaaaauaauucucuguccucucaugaacugaaccacuuucagugcuuacuacuguguaagugagagcaaggguugguuuucugacaaagacaucuauaugcagagagccagcucucucggcaagacauuuccuaagaaauccuucuggugaugugguaacaccaagcuuugugguacucauaaaauuucugucuaaauuuauuacaaguugcccagcaauuuugguuaaggaccuagaucacauuucaguguuaaugucaagaugacucuuauagauguaaauuuaaauagagcagggaagaugaauaucaugcaauucuuagcacccuggcauaggauaacaguggaccaccaugaacaguggugcugcaaacaccaucagugaaacagaacagggauuaugcaggcaaccaaauaaaacauuaaccuagaacacugggaaaaacaucugcagaggagcacaaggagugaacugcuuuucauuauggccagugcucuguauuagagcucugacaguaucuccagaauacaguaggagccugggcaucuguugacuuuuucugccuugcucacuuucacuguauuuuaucugaaauaggaaacaaucucugcucaggggaauucaugggacaaauguuauuuaagauuagggaggagguaaaacagggcugcuuaggaucuccaagugguucaucauucuuucacugggaguugacacuuggagaccuuccuguuucuggggauuuacucaacacaugcugcucauuuucacaguggagcagggccuacccuguuaaaugccaggaaauauaagaaucccucagacucaugaaaugagaguaaaaucugaaauuuucucuccuaggucaccucguccacgucauaauuccuuaugcuguuugcuuaccccaucgauaguaggcacuuucauuuacagugauauucugagugacuccccacucgguucugaugaugggacuaggaggaauaugggguccugcccuuggaaggagcauagcuugguuugaauacacacugaugccaugugacagccauggauguagggaggacucugcuccuugccucuuuccccgccaucucccccagcaacuuguuacagccgcaucucacaauuacaaugcaggacaguaucuacagcacaaugagucuauguacacauggaccauucccuuggcaugcuuuagagagagacacacacacgcucacacacauguacacccacgugagagcgaaagacuugagcacacacgcacaguggagaaaaugaaaauggcacuuccuagcauuugcggcaugacuagugcucuggggaggggguggaggugaggagaggugagggaggaaaggugggugaaaagggaguaucuagggugggugugggggagauagaacgcacuggagggagaggggaugaucucuaaaguuggagagauaguggaggaaggaaagccagagaaaggcucaacauaagauuccauugauagucugaaguggcuacaagucagcucaaaugaaaaauagaauuaaaagguuauggaaauauaaacaccaaaggcaagaccuuauuuucuuccccacagaugaaaaaagaugaaggaaggaaggauaaaguguguguuggggggcuuaauauccaucugguucuucucuuauuuuuacagcauccagauguccuuagugugguguagucuuuacacagcauacauuugcuuaguagauauaaacauaucccaguagaaccuucuccauccugaaugauacauaaauuuuuaaugauggacuguaaaauuguuuuaaauguuguauuuucuucuucacuuucuuauuucccccuucauguauaaacacacaaaguugugaaauaaacggucucccccaucucucucucucucucucucucugucucucucucucuguauucugugugacgcauuuuuguguguuuuuuaaauuauuuuuaaauuuuuauucuauuaacauuugcugagaaggcagagcagagaugcugccagcagccacagugguacggccagacugauggauccauuuauuccucucaccgacccaggucugaaaaggacuaggcuggcauuggugacccccagcuuguuggcagccacacagguguaguugccguagugcuccucagugacguuggucaccgucagggaagacuggcccuccgugcucuuaaucucaaggccauuggcacuauuuauccuagugucaucccgguaccacucaaagucaggugcaggcacugccgaggccucacauuugagugaagcuugucguccugugguggcuucauugcucuuggauucugugauagugggaggauaguucacagugaccuugacuuguuugacauccgccgaggagaccucguuggcagcuuugcacucauauuugccugacugcucccuggugaugccaaggaucuccagauauucuucuucuccuucaaauucccuuccuccucgcgcucuuuaaucuucuuuccucaacuccuaaacuuccccccgccccuacuucuuc

SEQ ID NO: 2813 - RNA, 505 nt, Homo sapiens
gaauagcaaauaguuuauugguaaguacacgguuucaacgggaguaauaaauucacaugaaaaggagacaauaaucaagucaaaagaauaaaugcuuacuaaucaucagaaaaucuguggccauuagggcuggcacguaaaaauccaaaaucacucagaggccaaaucuuaaagaagauucguccucuuauuaguccauauggaauagguccauagcaccuggaaucuguagaauucuguagauugucaccuucuaaccaaacaugacccauuggcaccauuaauaugaguuuuugauauuuuuguuuuaggucugauauauuugcagaugggucugcucccaggaugcuguaccaauccuuuuuuggcaucugcucaaccgccaucauccauggaaccagaagugggccuucucagauuagcuaacuucacauaggcgcugcuacccacuccucgccugcugucggccagaacuccggaccggcuucuucuuccgccggaaguc

SEQ ID NO: 2814 - RNA, 6350 nt, Homo sapiens
uagcuguuuuccaaaauauauuugcaaauggacaaaguggguguggagaaggaccccccacacuugccuccccauacaacacccauucucccccugggucuuuauuucaucuuuaaaaaaacaaaacaaaaaaaguaaaaacuaaacagaaaagcacucuguacaaagccuggauacugacaccauugcuguuccuuccucauggggggcaguacuagguuucagggacagucucugaaugggucgcuuuuguucuuagacacucccuuagggccgcuuccccucucaggccagcuucccuaaggcuuucaguacccaggaucuggaaggaaagggccaagcugggcuguggcauccacuggacccuagagucucauugggcagggccucagaauccacaaagacuccccagugcuguuccucuuccaacgaggcuggaccccuuccagccaucugggaacucaagcaggaaggaagguuccuuaggacagguuccuggcauggcagguuccccuggaaguggucggagggcccucccaccucuugaugccagcagaagucaggccuucccugcucccugaggacacaucagggcuucugcggacuuggccuucugguucacacuggcacguccagacccagguacucuggguucucugccguaggugucccuuugaaggugcuggguggagccccccgcucugguggguccuggucccaguaauagagguugucgaaggcugggcugaaggcaggaggaggguggggcugaggggcagcuccucccuggggugucaaguacucgggguucuccacggcacccccaaaggcaaaaacgucuuugacgaccccauucuucccuggggagagagucuugggccuuuccagaguggcaccagcaggucgggcagcaggcagagggcccucucggggcgaagggggcuggggccgaacaucuggcugguucacauauucaggcugggggcugcaggucaggggggcaacguagccaucagucucagagggcagggguacugugggguccucacuguaccgcuguagagggcuggggucauguguggggaggcuuugcagccccuuggcugcccccauucccaggucaccaucaaauacaucggagccagccccuucggagggugccaguggagaccugggggccuccucuucagagggcuccagcccuagugucagguccccaccgccacuccugguagaugagcugcggugccugugguggaccaugcccccagcgcccggggcagggucuggacagaagaagcccugcugggguaccagauacuccucagcauccaccaggucccccaugucaucguccuccagcagugagcgguagaaggugcuguccaagggacuggcugggcccaaguccucauucuggaugaccacaaagcgcugggggucccuggccaugcgggagaauucagacaccaacucccggaaucuuggccgacauucagagucaaucauccaacauuugaccaugaucauguagacaucaauggugcagauggggggcuggggcagccgcucccccuuuuccagcaggucagggaucucccgggcugggaucccaucguaagguuuggccccaaaagucaucagcucccacacagucacaccauaacuccacacaucacucuggugggugaaccgccggcggagaauggacuccagcgccauccacuugaugggcaccuugcccccaucugcaugguacucugucucgucaauguccagcagccgagccagcccgaagucuguaauuuugacaugguugggacucuugaccagcacguuccgagcggccaagucccuguguacgagccgcacauccuccagguagcucauccccuuggcaaucugcauacaccaguucagcagguccugggagcccaggcguccgcgguuuucccggacauggucuaagaggcagccauagggcauaagcugugucaccagcugcaccguggaugucaggcagaugcccagaaggcgggagacauauggggagcccacaccagccaucacguaugcuucgucuaagauuucuuuguuggcuuugggggauguguuuucccucaacacuuugauggccacuggaauuuucacauucuccccaucagggauccagaugcccuuguagacugugccaaaagcgccagauccaagcaccuucaccuuccucagcuccgucucuuucaggauccgcaucugcgccugguugggcaucgcuccgcuaggugucagcggcuccaccagcuccguuuccugcagcagucuccgcaucguguacuuccggaucuucugcugccgucgcuugaugaggaucccaaagaccacccccaagaccacgaccagcagaaugccaaccaccgcagagaugauggacgucagagggcuggcucucugcucggcggggcagcccuugucauccagguccacacaggagugggugcaguugauggggcaaggcuggcaugcgcccuccucaucuggaaacuuccagaugggcauguaggagaggucagguuucacaccgcuggggcagcgggccacgcagaagggaggguccuuauagugggcacaggccacacacuggucagccuccgguccaaaacaggucacugagccauucuggggcugacacucaggguggcacggcaaacagugccuggcauucacauacucccuggggagccccugcaguacucggcauuccuccacgcacuccuggccccgaaggaacuggcugcaguugacacacugggugggcccuggaccccagcagugcccucgggcgcacagcugguggcaggccaggcccucgcccacacacucguccucuggccgguuggcaguguggagcagagcuuggugcggguuccgaaagagcuggucccagggcaccgugugcacgaagcagagguggguguuaugguggaugagggccaguccacugcccaguucccucagugagcgcagccccagccagcugaugcccagcccuugcagggucagcgaguaggcgccauugugcagaauucguccccggauuacuugcagguucuggaagacgcugaggucaggcaggcuguccggccaugcugagauguauagguaaccugugaucucuuccagagucucaaacacuuggagcugcucuggcuggagcggggcaguguuggaggcuggguccccaucaaagcucuccggcagaaaugccaggcucccaaagaucuucuugcagccagcaaacuccuggauauuggcacugguaacugcccucaccucucgcaagugcuccaugcccagaccauagcacacucgggcacagggcuugcugcacuucucacaccgcuguguuccauccucugcugucaccucuugguugugcagggggcagacgagggugcaggaucccacguccguagaaagguaguuguagggacaggcagucacacagcuggcgccgaauguauaccggcccucgggauugggcauggacucaaacgugucuguguuguaggugaccagggcugggcagugcagcucacagaugccacugugguugaaguggaggcaggccaggcagucagagugcuuggggcccgugcagccggcagcacacugcucauggcagcagucagugggcaguggccccuugcagcgggcacagccaccggcacagacagugcgcgucaggcucugacaauccucagaacucucuccccagcagcgggagcccuuacacaucggagaacagggguggcaggcccgagagcgguuggugucuaucagugugagagccagcugguuguucuuguggaagauguccuuccacaaaaucguguccugguagcagagcuggggguuccgcuggaucaagaccccuccuuucaagaucucugugaggcuucgaagcugcagcucccgcaggccuccuggggaggccccugugacaggggugguauuguucagcgggucuccauugucuagcacggccagggcauaguuguccucaaagagcugggugccucgcacaauccgcagccucugcagugggaccugccucacuugguugugagcgaugagcacguagcccugcaccuccuggauauccugcaggaaggacaggcuggcauuggugggcagguaggugaguuccagguuucccugcaccaccuggcagcccugguagagguggcggagcauguccaggugggucucgggacuggcagggagccgcagcuucaugucugugccggugcacacuuguggcuuccaggacccccggggcauaucuucuggaaucuuugaaguaucucacuuuugugcauguccacaacaguacaugucacucucaucacugccugcgcaggcauggcugccagggucugagucucugugcugcacugcguuuguccuggccauucuacuggugcccccguuuuaucugugacucuuugcucagggaguagcuuugcauguggucuugaauauagcuuugcuuugccaccauucauuaaguggaaguggaucaucacaaagguuuucauccucaucaucuucacauugaguaggcggcaggaugagauaaugcuucacuuucugcagguggcacaaagagaggacaaagcccuggggguuccgcugacucucccggaccaggaacaggccgucuaccaagcccugcuguccaauaagccgcuggcucuccucacgggaaaugcgcccguggaaccagaguugggugcgguggauggcugcacugaggcucgugccggaggcuggcaugggcaggcugaggcggugguuugucuucuuccuccaggccugggccuccuccagggccacacucagagccucccggggguucucaaugacacgcccagcauggccagagaaguccauggccaccaggguauuaucugaggcacuucucaaggguggggagcccaaacaagauggaugcagauggcgagacugugccugcugguaauucuuguacagcugcaccccguacuugaagaggcggaaggcagccagccagcaggugcggcucugcucaucuucacugcagaagauccgaagccccuuguggccauuucgaagcuuguugggcuugacacagaaaccgaagucagugggcaucccguagagcuugcggcccugcgucaccacguacacguuggacucguucacaucugccacguacugcaggugccucggauccuuagaggugcccuugguggaguaauagaggccagaucggcgcaagaagcagaaaaagcguuuccaaagcuuccguccugaaccccgcagcugcagaaagcccuggaucucaggaaagcugccagcauucaggaaguucuggaugaggucuucaugggauauaccagugugugcaucgagacagcuggagaccauuuuuucugggaacagggaguguggggagcucuugaacaguucguacuuggcgaaguuuuuccggaagacgaagcggcuaucuccgcccacgggccaggcagccugcacuuccaccacggacucgugguccuccaaaccccgcuccagugcuagguggggguggcacuccaccagcccccaggucucgucgcucaaggcgugagcucgcugcaccagcauuucacacacguggcgagcuguggcaccugcugccaccuccacagaccugcaggccccauccucacuguacaccuuuacuacaugggggcggcuggcaucgcgggggagcagcccccuugcacuggaggggcccccgagaauugggcucugugagggaggacugcagagcucagggaagggguuggggauagaggggagggagguggcacgccucuccuccucucgaaguuuccugccggugguugggaugaggagaggcugggaccucuuuaccuccucaggcagagggguaucagggggccggggagucccaggaggggucccaggggcugggcaaaggucuuccggagagcugcuaagaugagguggagacagauccagcuccauggcgucugagcaagagaggggcuuaacggaaccaguugugugcccuuguccuggaggagccccagcaggaguagcaggacacccguuccgaagucuggcuccgucuaggaacccccagauuccuggauuuuauuucagauccacucccgcuucucuacaggugguaggagggugucccgacuucggacagagaagucagaggcgggggggagcccuguguguccagauuccaggcccaaggaaacuaaaauuaucuugggcagaugggggcgggu

SEQ ID NO: 2815 - RNA, 4798 nt, Homo sapiens
uagcuguuuuccaaaauauauuugcaaauggacaaaguggguguggagaaggaccccccacacuugccuccccauacaacacccauucucccccugggucuuuauuucaucuuuaaaaaaacaaaacaaaaaaaguaaaaacuaaacagaaaagcacucuguacaaagccuggauacugacaccauugcuguuccuuccucauggggggcaguacuagguuucagggacagucucugaaugggucgcuuuuguucuuagacacucccuuagggccgcuuccccucucaggccagcuucccuaaggcuuucaguacccaggaucuggaaggaaagggccaagcugggcuguggcauccacuggacccuagagucucauugggcagggccucagaauccacaaagacuccccagugcuguuccucuuccaacgaggcuggaccccuuccagccaucugggaacucaagcaggaaggaagguuccuuaggacagguuccuggcauggcagguuccccuggaaguggucggagggcccucccaccucuugaugccagcagaagucaggccuucccugcucccugaggacacaucagggcuucugcggacuuggccuucugguucacacuggcacguccagacccagguacucuggguucucugccguaggugucccuuugaaggugcuggguggagccccccgcucugguggguccuggucccaguaauagagguugucgaaggcugggcugaaggcaggaggaggguggggcugaggggcagcuccucccuggggugucaaguacucgggguucuccacggcacccccaaaggcaaaaacgucuuugacgaccccauucuucccuggggagagagucuugggccuuuccagaguggcaccagcaggucgggcagcaggcagagggcccucucggggcgaagggggcuggggccgaacaucuggcugguucacauauucaggcugggggcugcaggucaggggggcaacguagccaucagucucagagggcagggguacugugggguccucacuguaccgcuguagagggcuggggucauguguggggaggcuuugcagccccuuggcugcccccauucccaggucaccaucaaauacaucggagccagccccuucggagggugccaguggagaccugggggccuccucuucagagggcuccagcccuagugucagguccccaccgccacuccugguagaugagcugcggugccugugguggaccaugcccccagcgcccggggcagggucuggacagaagaagcccugcugggguaccagauacuccucagcauccaccaggucccccaugucaucguccuccagcagugagcgguagaaggugcuguccaagggacuggcugggcccaaguccucauucuggaugaccacaaagcgcugggggucccuggccaugcgggagaauucagacaccaacucccggaaucuuggccgacauucagagucaaucauccaacauuugaccaugaucauguagacaucaauggugcagauggggggcuggggcagccgcucccccuuuuccagcaggucagggaucucccgggcugggaucccaucguaagguuuggccccaaaagucaucagcucccacacagucacaccauaacuccacacaucacucuggugggugaaccgccggcggagaauggacuccagcgccauccacuugaugggcaccuugcccccaucugcaugguacucugucucgucaauguccagcagccgagccagcccgaagucuguaauuuugacaugguugggacucuugaccagcacguuccgagcggccaagucccuguguacgagccgcacauccuccagguagcucauccccuuggcaaucugcauacaccaguucagcagguccugggagcccaggcguccgcgguuuucccggacauggucuaagaggcagccauagggcauaagcugugucaccagcugcaccguggaugucaggcagaugcccagaaggcgggagacauauggggagcccacaccagccaucacguaugcuucgucuaagauuucuuuguuggcuuugggggauguguuuucccucaacacuuugauggccacuggaauuuucacauucuccccaucagggauccagaugcccuuguagacugugccaaaagcgccagauccaagcaccuucaccuuccucagcuccgucucuuucaggauccgcaucugcgccugguugggcaucgcuccgcuaggugucagcggcuccaccagcuccguuuccugcagcagucuccgcaucguguacuuccggaucuucugcugccgucgcuugaugaggaucccaaagaccacccccaagaccacgaccagcagaaugccaaccaccgcagagaugauggacgucagagggcuggcucucugcucggcggggcagcccuugucauccagguccacacaggagugggugcaguugauggggcaaggcuggcaugcgcccuccucaucuggaaacuuccagaugggcauguaggagaggucagguuucacaccgcuggggcagcgggccacgcagaagggaggguccuuauagugggcacaggccacacacuggucagccuccgguccaaaacaggucacugagccauucuggggcugacacucaggguggcacggcaaacagugccuggcauucacauacucccuggggagccccugcaguacucggcauuccuccacgcacuccuggccccgaaggaacuggcugcaguugacacacugggugggcccuggaccccagcagugcccucgggcgcacagcugguggcaggccaggcccucgcccacacacucguccucuggccgguuggcaguguggagcagagcuuggugcggguuccgaaagagcuggucccagggcaccgugugcacgaagcagagguggguguuaugguggaugagggccaguccacugcccaguucccucagugagcgcagccccagccagcugaugcccagcccuugcagggucagcgaguaggcgccauugugcagaauucguccccggauuacuugcagguucuggaagacgcugaggucaggcaggcuguccggccaugcugagauguauagguaaccugugaucucuuccagagucucaaacacuuggagcugcucuggcuggagcggggcaguguuggaggcuggguccccaucaaagcucuccggcagaaaugccaggcucccaaagaucuucuugcagccagcaaacuccuggauauuggcacugguaacugcccucaccucucgcaagugcuccaugcccagaccauagcacacucgggcacagggcuugcugcacuucucacaccgcuguguuccauccucugcugucaccucuugguugugcagggggcagacgagggugcaggaucccacguccguagaaagguaguuguagggacaggcagucacacagcuggcgccgaauguauaccggcccucgggauugggcauggacucaaacgugucuguguuguaggugaccagggcugggcagugcagcucacagaugccacugugguugaaguggaggcaggccaggcagucagagugcuuggggcccgugcagccggcagcacacugcucauggcagcagucagugggcaguggccccuugcagcgggcacagccaccggcacagacagugcgcgucaggcucugacaauccucagaacucucuccccagcagcgggagcccuuacacaucggagaacagggguggcaggcccgagagcgguuggugucuaucagugugagagccagcugguuguucuuguggaagauguccuuccacaaaaucguguccugguagcagagcuggggguuccgcuggaucaagaccccuccuuucaagaucucugugaggcuucgaagcugcagcucccgcaggccuccuggggaggccccugugacaggggugguauuguucagcgggucuccauugucuagcacggccagggcauaguuguccucaaagagcugggugccucgcacaauccgcagccucugcagugggaccugccucacuugguugugagcgaugagcacguagcccugcaccuccuggauauccugcaggaaggacaggcuggcauuggugggcagguaggugaguuccagguuucccugcaccaccuggcagcccugguagagguggcggagcauguccaggugggucucgggacuggcagggagccgcagcuucaugucugugccggugcacacuuguggcuuccaggacccccggggcauaucuucuggaaucuuugaaguaucucacuuuugugcauguccacaacaguacaugucacucucaucacugccugcgcaggcauggcugccagggucugagucucugugcugcacugcguuuguccuggccauucuacuggugcccccguuuuaucugugacucuuugcucagggaguagcuuugcauguggucuugaauauagcuuugcuuugccaccauucauuaaguggaaguggaucaucacaaagguuuucauccucaucaucuucacauugaguaggcauaagccaaauucugugcuggagguagaguggugaacaggacagcaaagguucuaccccgcauggggaagcaaucacccucgggaggugguacuucaauugcgacugaaccccgagcgucaggacacccggcugggaccacgucuucagggagggagacgccaggcccuuaacu

SEQ ID NO: 2816 - RNA, 4167 nt, Homo sapiens
uagcuguuuuccaaaauauauuugcaaauggacaaaguggguguggagaaggaccccccacacuugccuccccauacaacacccauucucccccugggucuuuauuucaucuuuaaaaaaacaaaacaaaaaaaguaaaaacuaaacagaaaagcacucuguacaaagccuggauacugacaccauugcuguuccuuccucauggggggcaguacuagguuucagggacagucucugaaugggucgcuuuuguucuuagacacucccuuagggccgcuuccccucucaggccagcuucccuaaggcuuucaguacccaggaucuggaaggaaagggccaagcugggcuguggcauccacuggacccuagagucucauugggcagggccucagaauccacaaagacuccccagugcuguuccucuuccaacgaggcuggaccccuuccagccaucugggaacucaagcaggaaggaagguuccuuaggacagguuccuggcauggcagguuccccuggaaguggucggagggcccucccaccucuugaugccagcagaagucaggccuucccugcucccugaggacacaucagggcuucugcggacuuggccuucugguucacacuggcacguccagacccagguacucuggguucucugccguaggugucccuuugaaggugcuggguggagccccccgcucugguggguccuggucccaguaauagagguugucgaaggcugggcugaaggcaggaggaggguggggcugaggggcagcuccucccuggggugucaaguacucgggguucuccacggcacccccaaaggcaaaaacgucuuugacgaccccauucuucccuggggagagagucuugggccuuuccagaguggcaccagcaggucgggcagcaggcagagggcccucucggggcgaagggggcuggggccgaacaucuggcugguucacauauucaggcugggggcugcaggucaggggggcaacguagccaucagucucagagggcagggguacugugggguccucacuguaccgcuguagagggcuggggucauguguggggaggcuuugcagccccuuggcugcccccauucccaggucaccaucaaauacaucggagccagccccuucggagggugccaguggagaccugggggccuccucuucagagggcuccagcccuagugucagguccccaccgccacuccugguagaugagcugcggugccugugguggaccaugcccccagcgcccggggcagggucuggacagaagaagcccugcugggguaccagauacuccucagcauccaccaggucccccaugucaucguccuccagcagugagcgguagaaggugcuguccaagggacuggcugggcccaaguccucauucuggaugaccacaaagcgcugggggucccuggccaugcgggagaauucagacaccaacucccggaaucuuggccgacauucagagucaaucauccaacauuugaccaugaucauguagacaucaauggugcagauggggggcuggggcagccgcucccccuuuuccagcaggucagggaucucccgggcugggaucccaucguaagguuuggccccaaaagucaucagcucccacacagucacaccauaacuccacacaucacucuggugggugaaccgccggcggagaauggacuccagcgccauccacuugaugggcaccuugcccccaucugcaugguacucugucucgucaauguccagcagccgagccagcccgaagucuguaauuuugacaugguugggacucuugaccagcacguuccgagcggccaagucccuguguacgagccgcacauccuccagguagcucauccccuuggcaaucugcauacaccaguucagcagguccugggagcccaggcguccgcgguuuucccggacauggucuaagaggcagccauagggcauaagcugugucaccagcugcaccguggaugucaggcagaugcccagaaggcgggagacauauggggagcccacaccagccaucacguaugcuucgucuaagauuucuuuguuggcuuugggggauguguuuucccucaacacuuugauggccacuggaauuuucacauucuccccaucagggauccagaugcccuuguagacugugccaaaagcgccagauccaagcaccuucaccuuccucagcuccgucucuuucaggauccgcaucugcgccugguugggcaucgcuccgcuaggugucagcggcuccaccagcuccguuuccugcagcagucuccgcaucguguacuuccggaucuucugcugccgucgcuugaugaggaucccaaagaccacccccaagaccacgaccagcagaaugccaaccaccgcagagaugauggacgucagagggcggcaggaugagauaaugcuucacuuucugcagguggcacaaagagaggacaaagcccuggggguuccgcugacucucccggaccaggaacaggccgucuaccaagcccugcuguccaauaagccgcuggcucuccucacgggaaaugcgcccguggaaccagaguugggugcgguggauggcugcacugaggcucgugccggaggcuggcaugggcaggcugaggcggugguuugucuucuuccuccaggccugggccuccuccagggccacacucagagccucccggggguucucaaugacacgcccagcauggccagagaaguccauggccaccaggguauuaucugaggcacuucucaaggguggggagcccaaacaagauggaugcagauggcgagacugugccugcugguaauucuuguacagcugcaccccguacuugaagaggcggaaggcagccagccagcaggugcggcucugcucaucuucacugcagaagauccgaagccccuuguggccauuucgaagcuuguugggcuugacacagaaaccgaagucagugggcaucccguagagcuugcggcccugcgucaccacguacacguuggacucguucacaucugccacguacugcaggugccucggauccuuagaggugcccuugguggaguaauagaggccagaucggcgcaagaagcagaaaaagcguuuccaaagcuuccguccugaaccccgcagcugcagaaagcccuggaucucaggaaagcugccagcauucaggaaguucuggaugaggucuucaugggauauaccagugugugcaucgagacagcuggagaccauuuuuucugggaacagggaguguggggagcucuugaacaguucguacuuggcgaaguuuuuccggaagacgaagcggcuaucuccgcccacgggccaggcagccugcacuuccaccacggacucgugguccuccaaaccccgcuccagugcuagguggggguggcacuccaccagcccccaggucucgucgcucaaggcgugagcucgcugcaccagcauuucacacacguggcgagcuguggcaccugcugccaccuccacagaccugcaggccccauccucacuguacaccuuuacuacaugggggcggcuggcaucgcgggggagcagcccccuugcacuggaggggcccccgagaauugggcucugugagggaggacugcagagcucagggaagggguuggggauagaggggagggagguggcacgccucuccuccucucgaaguuuccugccggugguugggaugaggagaggcugggaccucuuuaccuccucaggcagagggguaucagggggccggggagucccaggaggggucccaggggcugggcaaaggucuuccggagagcugcuaagaugagguggagacagauccagcuccauggcgucugagcaagagaggggcuuaacggaaccaguugugugcccuuguccuggaggagccccagcaggaguagcaggacacccguuccgaagucuggcuccgucuaggaacccccagauuccuggauuuuauuucagauccacucccgcuucucuacaggugguaggagggugucccgacuucggacagagaagucagaggcgggggggagcccuguguguccagauuccaggcccaaggaaacuaaaauuaucuugggcagaugggggcgggu

SEQ ID NO: 2817 - RNA, 4806 nt, Homo sapiens
uagcuguuuuccaaaauauauuugcaaauggacaaaguggguguggagaaggaccccccacacuugccuccccauacaacacccauucucccccugggucuuuauuucaucuuuaaaaaaacaaaacaaaaaaaguaaaaacuaaacagaaaagcacucuguacaaagccuggauacugacaccauugcuguuccuuccucauggggggcaguacuagguuucagggacagucucugaaugggucgcuuuuguucuuagacacucccuuagggccgcuuccccucucaggccagcuucccuaaggcuuucaguacccaggaucuggaaggaaagggccaagcugggcuguggcauccacuggacccuagagucucauugggcagggccucagaauccacaaagacuccccagugcuguuccucuuccaacgaggcuggaccccuuccagccaucugggaacucaagcaggaaggaagguuccuuaggacagguuccuggcauggcagguuccccuggaaguggucggagggcccucccaccucuugaugccagcagaagucaggccuucccugcucccugaggacacaucagggcuucugcggacuuggccuucugguucacacuggcacguccagacccagguacucuggguucucugccguaggugucccuuugaaggugcuggguggagccccccgcucugguggguccuggucccaguaauagagguugucgaaggcugggcugaaggcaggaggaggguggggcugaggggcagcuccucccuggggugucaaguacucgggguucuccacggcacccccaaaggcaaaaacgucuuugacgaccccauucuucccuggggagagagucuugggccuuuccagaguggcaccagcaggucgggcagcaggcagagggcccucucggggcgaagggggcuggggccgaacaucuggcugguucacauauucaggcugggggcugcaggucaggggggcaacguagccaucagucucagagggcagggguacugugggguccucacuguaccgcuguagagggcuggggucauguguggggaggcuuugcagccccuuggcugcccccauucccaggucaccaucaaauacaucggagccagccccuucggagggugccaguggagaccugggggccuccucuucagagggcuccagcccuagugucagguccccaccgccacuccugguagaugagcugcggugccugugguggaccaugcccccagcgcccggggcagggucuggacagaagaagcccugcugggguaccagauacuccucagcauccaccaggucccccaugucaucguccuccagcagugagcgguagaaggugcuguccaagggacuggcugggcccaaguccucauucuggaugaccacaaagcgcugggggucccuggccaugcgggagaauucagacaccaacucccggaaucuuggccgacauucagagucaaucauccaacauuugaccaugaucauguagacaucaauggugcagauggggggcuggggcagccgcucccccuuuuccagcaggucagggaucucccgggcugggaucccaucguaagguuuggccccaaaagucaucagcucccacacagucacaccauaacuccacacaucacucuggugggugaaccgccggcggagaauggacuccagcgccauccacuugaugggcaccuugcccccaucugcaugguacucugucucgucaauguccagcagccgagccagcccgaagucuguaauuuugacaugguugggacucuugaccagcacguuccgagcggccaagucccuguguacgagccgcacauccuccagguagcucauccccuuggcaaucugcauacaccaguucagcagguccugggagcccaggcguccgcgguuuucccggacauggucuaagaggcagccauagggcauaagcugugucaccagcugcaccguggaugucaggcagaugcccagaaggcgggagacauauggggagcccacaccagccaucacguaugcuucgucuaagauuucuuuguuggcuuugggggauguguuuucccucaacacuuugauggccacuggaauuuucacauucuccccaucagggauccagaugcccuuguagacugugccaaaagcgccagauccaagcaccuucaccuuccucagcuccgucucuuucaggauccgcaucugcgccugguugggcaucgcuccgcuaggugucagcggcuccaccagcuccguuuccugcagcagucuccgcaucguguacuuccggaucuucugcugccgucgcuugaugaggaucccaaagaccacccccaagaccacgaccagcagaaugccaaccaccgcagagaugauggacgucagagggcuggcucucugcucggcggggcagcccuugucauccagguccacacaggagugggugcaguugauggggcaaggcuggcaugcgcccuccucaucuggaaacuuccagaugggcauguaggagaggucagguuucacaccgcuggggcagcgggccacgcagaagggaggguccuuauagugggcacaggccacacacuggucagccuccgguccaaaacaggucacugagccauucuggggcugacacucaggguggcacggcaaacagugccuggcauucacauacucccuggggagccccugcaguacucggcauuccuccacgcacuccuggccccgaaggaacuggcugcaguugacacacugggugggcccuggaccccagcagugcccucgggcgcacagcugguggcaggccaggcccucgcccacacacucguccucuggccgguuggcaguguggagcagagcuuggugcggguuccgaaagagcuggucccagggcaccgugugcacgaagcagagguggguguuaugguggaugagggccaguccacugcccaguucccucagugagcgcagccccagccagcugaugcccagcccuugcagggucagcgaguaggcgccauugugcagaauucguccccggauuacuugcagguucuggaagacgcugaggucaggcaggcuguccggccaugcugagauguauagguaaccugugaucucuuccagagucucaaacacuuggagcugcucuggcuggagcggggcaguguuggaggcuggguccccaucaaagcucuccggcagaaaugccaggcucccaaagaucuucuugcagccagcaaacuccuggauauuggcacugguaacugcccucaccucucgcaagugcuccaugcccagaccauagcacacucgggcacagggcuugcugcacuucucacaccgcuguguuccauccucugcugucaccucuugguugugcagggggcagacgagggugcaggaucccacguccguagaaagguaguuguagggacaggcagucacacagcuggcgccgaauguauaccggcccucgggauugggcauggacucaaacgugucuguguuguaggugaccagggcugggcagugcagcucacagaugccacugugguugaaguggaggcaggccaggcagucagagugcuuggggcccgugcagccggcagcacacugcucauggcagcagucagugggcaguggccccuugcagcgggcacagccaccggcacagacagugcgcgucaggcucugacaauccucagaacucucuccccagcagcgggagcccuuacacaucggagaacagggguggcaggcccgagagcgguuggugucuaucagugugagagccagcugguuguucuuguggaagauguccuuccacaaaaucguguccugguagcagagcuggggguuccgcuggaucaagaccccuccuuucaagaucucugugaggcuucgaagcugcagcucccgcaggccuccuggggaggccccugugacaggggugguauuguucagcgggucuccauugucuagcacggccagggcauaguuguccucaaagagcugggugccucgcacaauccgcagccucugcagugggaccugccucacuugguugugagcgaugagcacguagcccugcaccuccuggauauccuguaaacagagggcucagcccagcuggaggcagggccuggcuggguugcccacgggccucaccugcaggaaggacaggcuggcauuggugggcagguaggugaguuccagguuucccugcaccaccuggcagcccugguagagguggcggagcauguccaggugggucucgggacuggcagggagccgcagcuucaugucugugccggugcacacugccggugguugggaugaggagaggcugggaccucuuuaccuccucaggcagagggguaucagggggccggggagucccaggaggggucccaggggcugggcaaaggucuuccggagagcugcuaagaugagguggagacagauccagcuccauggcgucugagcaagagaggggcuuaacggaaccaguugugugcccuuguccuggaggagccccagcaggaguagcaggacacccguuccgaagucuggcuccgucuaggaacccccagauuccuggauuuuauuucagauccacucccgcuucucuacaggugguaggagggugucccgacuucggacagagaagucagaggcgggggggagcccuguguguccagauuccaggcccaaggaaacuaaaauuaucuugggcagaugggggcgggu

SEQ ID NO: 2818 - RNA, 4446 nt, Homo sapiens
uagcuguuuuccaaaauauauuugcaaauggacaaaguggguguggagaaggaccccccacacuugccuccccauacaacacccauucucccccugggucuuuauuucaucuuuaaaaaaacaaaacaaaaaaaguaaaaacuaaacagaaaagcacucuguacaaagccuggauacugacaccauugcuguuccuuccucauggggggcaguacuagguuucagggacagucucugaaugggucgcuuuuguucuuagacacucccuuagggccgcuuccccucucaggccagcuucccuaaggcuuucaguacccaggaucuggaaggaaagggccaagcugggcuguggcauccacuggacccuagagucucauugggcagggccucagaauccacaaagacuccccagugcuguuccucuuccaacgaggcuggaccccuuccagccaucugggaacucaagcaggaaggaagguuccuuaggacagguuccuggcauggcagguuccccuggaaguggucggagggcccucccaccucuugaugccagcagaagucaggccuucccugcucccugaggacacaucagggcuucugcggacuuggccuucugguucacacuggcacguccagacccagguacucuggguucucugccguaggugucccuuugaaggugcuggguggagccccccgcucugguggguccuggucccaguaauagagguugucgaaggcugggcugaaggcaggaggaggguggggcugaggggcagcuccucccuggggugucaaguacucgggguucuccacggcacccccaaaggcaaaaacgucuuugacgaccccauucuucccuggggagagagucuugggccuuuccagaguggcaccagcaggucgggcagcaggcagagggcccucucggggcgaagggggcuggggccgaacaucuggcugguucacauauucaggcugggggcugcaggucaggggggcaacguagccaucagucucagagggcagggguacugugggguccucacuguaccgcuguagagggcuggggucauguguggggaggcuuugcagccccuuggcugcccccauucccaggucaccaucaaauacaucggagccagccccuucggagggugccaguggagaccugggggccuccucuucagagggcuccagcccuagugucagguccccaccgccacuccugguagaugagcugcggugccugugguggaccaugcccccagcgcccggggcagggucuggacagaagaagcccugcugggguaccagauacuccucagcauccaccaggucccccaugucaucguccuccagcagugagcgguagaaggugcuguccaagggacuggcugggcccaaguccucauucuggaugaccacaaagcgcugggggucccuggccaugcgggagaauucagacaccaacucccggaaucuuggccgacauucagagucaaucauccaacauuugaccaugaucauguagacaucaauggugcagauggggggcuggggcagccgcucccccuuuuccagcaggucagggaucucccgggcugggaucccaucguaagguuuggccccaaaagucaucagcucccacacagucacaccauaacuccacacaucacucuggugggugaaccgccggcggagaauggacuccagcgccauccacuugaugggcaccuugcccccaucugcaugguacucugucucgucaauguccagcagccgagccagcccgaagucuguaauuuugacaugguugggacucuugaccagcacguuccgagcggccaagucccuguguacgagccgcacauccuccagguagcucauccccuuggcaaucugcauacaccaguucagcagguccugggagcccaggcguccgcgguuuucccggacauggucuaagaggcagccauagggcauaagcugugucaccagcugcaccguggaugucaggcagaugcccagaaggcgggagacauauggggagcccacaccagccaucacguaugcuucgucuaagauuucuuuguuggcuuugggggauguguuuucccucaacacuuugauggccacuggaauuuucacauucuccccaucagggauccagaugcccuuguagacugugccaaaagcgccagauccaagcaccuucaccuuccucagcuccgucucuuucaggauccgcaucugcgccugguugggcaucgcuccgcuaggugucagcggcuccaccagcuccguuuccugcagcagucuccgcaucguguacuuccggaucuucugcugccgucgcuugaugaggaucccaaagaccacccccaagaccacgaccagcagaaugccaaccaccgcagagaugauggacgucagagggcuggcucucugcucggcggggcagcccuugucauccagguccacacaggagugggugcaguugauggggcaaggcuggcaugcgcccuccucaucuggaaacuuccagaugggcauguaggagaggucagguuucacaccgcuggggcagcgggccacgcagaagggaggguccuuauagugggcacaggccacacacuggucagccuccgguccaaaacaggucacugagccauucuggggcugacacucaggguggcacggcaaacagugccuggcauucacauacucccuggggagccccugcaguacucggcauuccuccacgcacuccuggccccgaaggaacuggcugcaguugacacacugggugggcccuggaccccagcagugcccucgggcgcacagcugguggcaggccaggcccucgcccacacacucguccucuggccgguuggcaguguggagcagagcuuggugcggguuccgaaagagcuggucccagggcaccgugugcacgaagcagagguggguguuaugguggaugagggccaguccacugcccaguucccucagugagcgcagccccagccagcugaugcccagcccuugcagggucagcgaguaggcgccauugugcagaauucguccccggauuacuugcagguucuggaagacgcugaggucaggcaggcuguccggccaugcugagauguauagguaaccugugaucucuuccagagucucaaacacuuggagcugcucuggcuggagcggggcaguguuggaggcuggguccccaucaaagcucuccggcagaaaugccaggcucccaaagaucuucuugcagccagcaaacuccuggauauuggcacugguaacugcccucaccucucgcaagugcuccaugcccagaccauagcacacucgggcacagggcuugcugcacuucucacaccgcuguguuccauccucugcugucaccucuugguugugcagggggcagacgagggugcaggaucccacguccguagaaagguaguuguagggacaggcagucacacagcuggcgccgaauguauaccggcccucgggauugggcauggacucaaacgugucuguguuguaggugaccagggcugggcagugcagcucacagaugccacugugguugaaguggaggcaggccaggcagucagagugcuuggggcccgugcagccggcagcacacugcucauggcagcagucagugggcaguggccccuugcagcgggcacagccaccggcacagacagugcgcgucaggcucugacaauccucagaacucucuccccagcagcgggagcccuuacacaucggagaacagggguggcaggcccgagagcgguuggugucuaucagugugagagccagcugguuguucuuguggaagauguccuuccacaaaaucguguccugguagcagagcuggggguuccgcuggaucaagaccccuccuuucaagaucucugugaggcuucgaagcugcagcucccgcaggccuccuggggaggccccugugacaggggugguauuguucagcgggucuccauugucuagcacggccagggcauaguuguccucaaagagcugggugccucgcacaauccgcagccucugcagugggaccugccucacuugguugugagcgaugagcacguagcccugcaccuccuggauauccuguaaacagagggcucagcccagcuggaggcagggccuggcuggguugcccacgggccucaccugcaggaaggacaggcuggcauuggugggcagguaggugaguuccagguuucccugcaccaccuggcagcccugguagagguggcggagcauguccaggugggucucgggacuggcagggagccgcagcuucaugucugugccggugcacacugaaccccgagcgucaggacacccggcugggaccacgucuucagggagggagacgccaggcccuuaacu

SEQ ID NO: 2819 - RNA, 4794 nt, Homo sapiens
uagcuguuuuccaaaauauauuugcaaauggacaaaguggguguggagaaggaccccccacacuugccuccccauacaacacccauucucccccugggucuuuauuucaucuuuaaaaaaacaaaacaaaaaaaguaaaaacuaaacagaaaagcacucuguacaaagccuggauacugacaccauugcuguuccuuccucauggggggcaguacuagguuucagggacagucucugaaugggucgcuuuuguucuuagacacucccuuagggccgcuuccccucucaggccagcuucccuaaggcuuucaguacccaggaucuggaaggaaagggccaagcugggcuguggcauccacuggacccuagagucucauugggcagggccucagaauccacaaagacuccccagugcuguuccucuuccaacgaggcuggaccccuuccagccaucugggaacucaagcaggaaggaagguuccuuaggacagguuccuggcauggcagguuccccuggaaguggucggagggcccucccaccucuugaugccagcagaagucaggccuucccugcucccugaggacacaucagggcuucugcggacuuggccuucugguucacacuggcacguccagacccagguacucuggguucucugccguaggugucccuuugaaggugcuggguggagccccccgcucugguggguccuggucccaguaauagagguugucgaaggcugggcugaaggcaggaggaggguggggcugaggggcagcuccucccuggggugucaaguacucgggguucuccacggcacccccaaaggcaaaaacgucuuugacgaccccauucuucccuggggagagagucuugggccuuuccagaguggcaccagcaggucgggcagcaggcagagggcccucucggggcgaagggggcuggggccgaacaucuggcugguucacauauucaggcugggggcugcaggucaggggggcaacguagccaucagucucagagggcagggguacugugggguccucacuguaccgcuguagagggcuggggucauguguggggaggcuuugcagccccuuggcugcccccauucccaggucaccaucaaauacaucggagccagccccuucggagggugccaguggagaccugggggccuccucuucagagggcuccagcccuagugucagguccccaccgccacuccugguagaugagcugcggugccugugguggaccaugcccccagcgcccggggcagggucuggacagaagaagcccugcugggguaccagauacuccucagcauccaccaggucccccaugucaucguccuccagcagugagcgguagaaggugcuguccaagggacuggcugggcccaaguccucauucuggaugaccacaaagcgcugggggucccuggccaugcgggagaauucagacaccaacucccggaaucuuggccgacauucagagucaaucauccaacauuugaccaugaucauguagacaucaauggugcagauggggggcuggggcagccgcucccccuuuuccagcaggucagggaucucccgggcugggaucccaucguaagguuuggccccaaaagucaucagcucccacacagucacaccauaacuccacacaucacucuggugggugaaccgccggcggagaauggacuccagcgccauccacuugaugggcaccuugcccccaucugcaugguacucugucucgucaauguccagcagccgagccagcccgaagucuguaauuuugacaugguugggacucuugaccagcacguuccgagcggccaagucccuguguacgagccgcacauccuccagguagcucauccccuuggcaaucugcauacaccaguucagcagguccugggagcccaggcguccgcgguuuucccggacauggucuaagaggcagccauagggcauaagcugugucaccagcugcaccguggaugucaggcagaugcccagaaggcgggagacauauggggagcccacaccagccaucacguaugcuucgucuaagauuucuuuguuggcuuugggggauguguuuucccucaacacuuugauggccacuggaauuuucacauucuccccaucagggauccagaugcccuuguagacugugccaaaagcgccagauccaagcaccuucaccuuccucagcuccgucucuuucaggauccgcaucugcgccugguugggcaucgcuccgcuaggugucagcggcuccaccagcuccguuuccugcagcagucuccgcaucguguacuuccggaucuucugcugccgucgcuugaugaggaucccaaagaccacccccaagaccacgaccagcagaaugccaaccaccgcagagaugauggacgucagagggcuggcucucugcucggcggggcagcccuugucauccagguccacacaggagugggugcaguugauggggcaaggcuggcaugcgcccuccucaucuggaaacuuccagaugggcauguaggagaggucagguuucacaccgcuggggcagcgggccacgcagaagggaggguccuuauagugggcacaggccacacacuggucagccuccgguccaaaacaggucacugagccauucuggggcugacacucaggguggcacggcaaacagugccuggcauucacauacucccuggggagccccugcaguacucggcauuccuccacgcacuccuggccccgaaggaacuggcugcaguugacacacugggugggcccuggaccccagcagugcccucgggcgcacagcugguggcaggccaggcccucgcccacacacucguccucuggccgguuggcaguguggagcagagcuuggugcggguuccgaaagagcuggucccagggcaccgugugcacgaagcagagguggguguuaugguggaugagggccaguccacugcccaguucccucagugagcgcagccccagccagcugaugcccagcccuugcagggucagcgaguaggcgccauugugcagaauucguccccggauuacuugcagguucuggaagacgcugaggucaggcaggcuguccggccaugcugagauguauagguaaccugugaucucuuccagagucucaaacacuuggagcugcucuggcuggagcggggcaguguuggaggcuggguccccaucaaagcucuccggcagaaaugccaggcucccaaagaucuucuugcagccagcaaacuccuggauauuggcacugguaacugcccucaccucucgcaagugcuccaugcccagaccauagcacacucgggcacagggcuugcugcacuucucacaccgcuguguuccauccucugcugucaccucuugguugugcagggggcagacgagggugcaggaucccacguccguagaaagguaguuguagggacaggcagucacacagcuggcgccgaauguauaccggcccucgggauugggcauggacucaaacgugucuguguuguaggugaccagggcugggcagugcagcucacagaugccacugugguugaaguggaggcaggccaggcagucagagugcuuggggcccgugcagccggcagcacacugcucauggcagcagucagugggcaguggccccuugcagcgggcacagccaccggcacagacagugcgcgucaggcucugacaauccucagaacucucuccccagcagcgggagcccuuacacaucggagaacagggguggcaggcccgagagcgguuggugucuaucagugugagagccagcugguuguucuuguggaagauguccuuccacaaaaucguguccugguagcagagcuggggguuccgcuggaucaagaccccuccuuucaagaucucugugaggcuucgaagcugcagcucccgcaggccuccuggggaggccccugugacaggggugguauuguucagcgggucuccauugucuagcacggccagggcauaguuguccucaaagagcugggugccucgcacaauccgcagccucugcagugggaccugccucacuugguugugagcgaugagcacguagcccugcaccuccuggauauccugcaggaaggacaggcuggcauuggugggcagguaggugaguuccagguuucccugcaccaccuggcagcccugguagagguggcggagcauguccaggugggucucgggacuggcagggagccgcagcuucaugucugugccggugcacacuuguggcuuccaggacccccggggcauaucuucuggaaucuuugaaguaucugccggugguugggaugaggagaggcugggaccucuuuaccuccucaggcagagggguaucagggggccggggagucccaggaggggucccaggggcugggcaaaggucuuccggagagcugcuaagaugagguggagacagauccagcuccauggcgucugagcaagagaggggcuuaacggaaccaguugugugcccuuguccuggaggagccccagcaggaguagcaggacacccguuccgaagucuggcuccgucuaggaacccccagauuccuggauuuuauuucagauccacucccgcuucucuacaggugguaggagggugucccgacuucggacagagaagucagaggcgggggggagcccuguguguccagauuccaggcccaaggaaacuaaaauuaucuugggcagaugggggcgggu

SEQ ID NO: 2820 - RNA, 4589 nt, Homo sapiens
uagcuguuuuccaaaauauauuugcaaauggacaaaguggguguggagaaggaccccccacacuugccuccccauacaacacccauucucccccugggucuuuauuucaucuuuaaaaaaacaaaacaaaaaaaguaaaaacuaaacagaaaagcacucuguacaaagccuggauacugacaccauugcuguuccuuccucauggggggcaguacuagguuucagggacagucucugaaugggucgcuuuuguucuuagacacucccuuagggccgcuuccccucucaggccagcuucccuaaggcuuucaguacccaggaucuggaaggaaagggccaagcugggcuguggcauccacuggacccuagagucucauugggcagggccucagaauccacaaagacuccccagugcuguuccucuuccaacgaggcuggaccccuuccagccaucugggaacucaagcaggaaggaagguuccuuaggacagguuccuggcauggcagguuccccuggaaguggucggagggcccucccaccucuugaugccagcagaagucaggccuucccugcucccugaggacacaucagggcuucugcggacuuggccuucugguucacacuggcacguccagacccagguacucuggguucucugccguaggugucccuuugaaggugcuggguggagccccccgcucugguggguccuggucccaguaauagagguugucgaaggcugggcugaaggcaggaggaggguggggcugaggggcagcuccucccuggggugucaaguacucgggguucuccacggcacccccaaaggcaaaaacgucuuugacgaccccauucuucccuggggagagagucuugggccuuuccagaguggcaccagcaggucgggcagcaggcagagggcccucucggggcgaagggggcuggggccgaacaucuggcugguucacauauucaggcugggggcugcaggucaggggggcaacguagccaucagucucagagggcagggguacugugggguccucacuguaccgcuguagagggcuggggucauguguggggaggcuuugcagccccuuggcugcccccauucccaggucaccaucaaauacaucggagccagccccuucggagggugccaguggagaccugggggccuccucuucagagggcuccagcccuagugucagguccccaccgccacuccugguagaugagcugcggugccugugguggaccaugcccccagcgcccggggcagggucuggacagaagaagcccugcugggguaccagauacuccucagcauccaccaggucccccaugucaucguccuccagcagugagcgguagaaggugcuguccaagggacuggcugggcccaaguccucauucuggaugaccacaaagcgcugggggucccuggccaugcgggagaauucagacaccaacucccggaaucuuggccgacauucagagucaaucauccaacauuugaccaugaucauguagacaucaauggugcagauggggggcuggggcagccgcucccccuuuuccagcaggucagggaucucccgggcugggaucccaucguaagguuuggccccaaaagucaucagcucccacacagucacaccauaacuccacacaucacucuggugggugaaccgccggcggagaauggacuccagcgccauccacuugaugggcaccuugcccccaucugcaugguacucugucucgucaauguccagcagccgagccagcccgaagucuguaauuuugacaugguugggacucuugaccagcacguuccgagcggccaagucccuguguacgagccgcacauccuccagguagcucauccccuuggcaaucugcauacaccaguucagcagguccugggagcccaggcguccgcgguuuucccggacauggucuaagaggcagccauagggcauaagcugugucaccagcugcaccguggaugucaggcagaugcccagaaggcgggagacauauggggagcccacaccagccaucacguaugcuucgucuaagauuucuuuguuggcuuugggggauguguuuucccucaacacuuugauggccacuggaauuuucacauucuccccaucagggauccagaugcccuuguagacugugccaaaagcgccagauccaagcaccuucaccuuccucagcuccgucucuuucaggauccgcaucugcgccugguugggcaucgcuccgcuaggugucagcggcuccaccagcuccguuuccugcagcagucuccgcaucguguacuuccggaucuucugcugccgucgcuugaugaggaucccaaagaccacccccaagaccacgaccagcagaaugccaaccaccgcagagaugauggacgucagagggcuggcucucugcucggcggggcagcccuugucauccagguccacacaggagugggugcaguugauggggcaaggcuggcaugcgcccuccucaucuggaaacuuccagaugggcauguaggagaggucagguuucacaccgcuggggcagcgggccacgcagaagggaggguccuuauagugggcacaggccacacacuggucagccuccgguccaaaacaggucacugagccauucuggggcugacacucaggguggcacggcaaacagugccuggcauucacauacucccuggggagccccugcaguacucggcauuccuccacgcacuccuggccccgaaggaacuggcugcaguugacacacugggugggcccuggaccccagcagugcccucgggcgcacagcugguggcaggccaggcccucgcccacacacucguccucuggccgguuggcaguguggagcagagcuuggugcggguuccgaaagagcuggucccagggcaccgugugcacgaagcagagguggguguuaugguggaugagggccaguccacugcccaguucccucagugagcgcagccccagccagcugaugcccagcccuugcagggucagcgaguaggcgccauugugcagaauucguccccggauuacuugcagguucuggaagacgcugaggucaggcaggcuguccggccaugcugagauguauagguaaccugugaucucuuccagagucucaaacacuuggagcugcucuggcuggagcggggcaguguuggaggcuggguccccaucaaagcucuccggcagaaaugccaggcucccaaagaucuucuugcagccagcaaacuccuggauauuggcacugguaacugcccucaccucucgcaagugcuccaugcccagaccauagcacacucgggcacagggcuugcugcacuucucacaccgcuguguuccauccucugcugucaccucuugguugugcagggggcagacgagggugcaggaucccacguccguagaaagguaguuguagggacaggcagucacacagcuggcgccgaauguauaccggcccucgggauugggcauggacucaaacgugucuguguuguaggugaccagggcugggcagugcagcucacagaugccacugugguugaaguggaggcaggccaggcagucagagugcuuggggcccgugcagccggcagcacacugcucauggcagcagucagugggcaguggccccuugcagcgggcacagccaccggcacagacagugcgcgucaggcucugacaauccucagaacucucuccccagcagcgggagcccuuacacaucggagaacagggguggcaggcccgagagcgguuggugucuaucagugugagagccagcugguuguucuuguggaagauguccuuccacaaaaucguguccugguagcagagcuggggguuccgcuggaucaagaccccuccuuucaagaucucugugaggcuucgaagcugcagcucccgcaggccuccuggggaggccccugugacaggggugguauuguucagcgggucuccauugucuagcacggccagggcauaguuguccucaaagagcugggugccucgcacaauccgcagccucugcagugggaccugccucacuugguugugagcgaugagcacguagcccugcaccuccuggauauccugcaggaaggacaggcuggcauuggugggcagguaggugaguuccagguuucccugcaccaccuggcagcccugguagagguggcggagcauguccaggugggucucgggacuggcagggagccgcagcuucaugucugugccggugcacacuuguggcuuccaggacccccggggcauaucuucuggaaucuuugaaguaucuggaggagccccagcaggaguagcaggacacccguuccgaagucuggcuccgucuaggaacccccagauuccuggauuuuauuucagauccacucccgcuucucuacaggugguaggagggugucccgacuucggacagagaagucagaggcgggggggagcccuguguguccagauuccaggcccaaggaaacuaaaauuaucuugggcagaugggggcgggu

SEQ ID NO: 2821 - RNA, 4953 nt, Homo sapiens
uagcuguuuuccaaaauauauuugcaaauggacaaaguggguguggagaaggaccccccacacuugccuccccauacaacacccauucucccccugggucuuuauuucaucuuuaaaaaaacaaaacaaaaaaaguaaaaacuaaacagaaaagcacucuguacaaagccuggauacugacaccauugcuguuccuuccucauggggggcaguacuagguuucagggacagucucugaaugggucgcuuuuguucuuagacacucccuuagggccgcuuccccucucaggccagcuucccuaaggcuuucaguacccaggaucuggaaggaaagggccaagcugggcuguggcauccacuggacccuagagucucauugggcagggccucagaauccacaaagacuccccagugcuguuccucuuccaacgaggcuggaccccuuccagccaucugggaacucaagcaggaaggaagguuccuuaggacagguuccuggcauggcagguuccccuggaaguggucggagggcccucccaccucuugaugccagcagaagucaggccuucccugcucccugaggacacaucagggcuucugcggacuuggccuucugguucacacuggcacguccagacccagguacucuggguucucugccguaggugucccuuugaaggugcuggguggagccccccgcucugguggguccuggucccaguaauagagguugucgaaggcugggcugaaggcaggaggaggguggggcugaggggcagcuccucccuggggugucaaguacucgggguucuccacggcacccccaaaggcaaaaacgucuuugacgaccccauucuucccuggggagagagucuugggccuuuccagaguggcaccagcaggucgggcagcaggcagagggcccucucggggcgaagggggcuggggccgaacaucuggcugguucacauauucaggcugggggcugcaggucaggggggcaacguagccaucagucucagagggcagggguacugugggguccucacuguaccgcuguagagggcuggggucauguguggggaggcuuugcagccccuuggcugcccccauucccaggucaccaucaaauacaucggagccagccccuucggagggugccaguggagaccugggggccuccucuucagagggcuccagcccuagugucagguccccaccgccacuccugguagaugagcugcggugccugugguggaccaugcccccagcgcccggggcagggucuggacagaagaagcccugcugggguaccagauacuccucagcauccaccaggucccccaugucaucguccuccagcagugagcgguagaaggugcuguccaagggacuggcugggcccaaguccucauucuggaugaccacaaagcgcugggggucccuggccaugcgggagaauucagacaccaacucccggaaucuuggccgacauucagagucaaucauccaacauuugaccaugaucauguagacaucaauggugcagauggggggcuggggcagccgcucccccuuuuccagcaggucagggaucucccgggcugggaucccaucguaagguuuggccccaaaagucaucagcucccacacagucacaccauaacuccacacaucacucuggugggugaaccgccggcggagaauggacuccagcgccauccacuugaugggcaccuugcccccaucugcaugguacucugucucgucaauguccagcagccgagccagcccgaagucuguaauuuugacaugguugggacucuugaccagcacguuccgagcggccaagucccuguguacgagccgcacauccuccagguagcucauccccuuggcaaucugcauacaccaguucagcagguccugggagcccaggcguccgcgguuuucccggacauggucuaagaggcagccauagggcauaagcugugucaccagcugcaccguggaugucaggcagaugcccagaaggcgggagacauauggggagcccacaccagccaucacguaugcuucgucuaagauuucuuuguuggcuuugggggauguguuuucccucaacacuuugauggccacuggaauuuucacauucuccccaucagggauccagaugcccuuguagacugugccaaaagcgccagauccaagcaccuucaccuuccucagcuccgucucuuucaggauccgcaucugcgccugguugggcaucgcuccgcuaggugucagcggcuccaccagcuccguuuccugcagcagucuccgcaucguguacuuccggaucuucugcugccgucgcuugaugaggaucccaaagaccacccccaagaccacgaccagcagaaugccaaccaccgcagagaugauggacgucagagggcuggcucucugcucggcggggcagcccuugucauccagguccacacaggagugggugcaguugauggggcaaggcuggcaugcgcccuccucaucuggaaacuuccagaugggcauguaggagaggucagguuucacaccgcuggggcagcgggccacgcagaagggaggguccuuauagugggcacaggccacacacuggucagccuccgguccaaaacaggucacugagccauucuggggcugacacucaggguggcacggcaaacagugccuggcauucacauacucccuggggagccccugcaguacucggcauuccuccacgcacuccuggccccgaaggaacuggcugcaguugacacacugggugggcccuggaccccagcagugcccucgggcgcacagcugguggcaggccaggcccucgcccacacacucguccucuggccgguuggcaguguggagcagagcuuggugcggguuccgaaagagcuggucccagggcaccgugugcacgaagcagagguggguguuaugguggaugagggccaguccacugcccaguucccucagugagcgcagccccagccagcugaugcccagcccuugcagggucagcgaguaggcgccauugugcagaauucguccccggauuacuugcagguucuggaagacgcugaggucaggcaggcuguccggccaugcugagauguauagguaaccugugaucucuuccagagucucaaacacuuggagcugcucuggcuggagcggggcaguguuggaggcuggguccccaucaaagcucuccggcagaaaugccaggcucccaaagaucuucuugcagccagcaaacuccuggauauuggcacugguaacugcccucaccucucgcaagugcuccaugcccagaccauagcacacucgggcacagggcuugcugcacuucucacaccgcuguguuccauccucugcugucaccucuugguugugcagggggcagacgagggugcaggaucccacguccguagaaagguaguuguagggacaggcagucacacagcuggcgccgaauguauaccggcccucgggauugggcauggacucaaacgugucuguguuguaggugaccagggcugggcagugcagcucacagaugccacugugguugaaguggaggcaggccaggcagucagagugcuuggggcccgugcagccggcagcacacugcucauggcagcagucagugggcaguggccccuugcagcgggcacagccaccggcacagacagugcgcgucaggcucugacaauccucagaacucucuccccagcagcgggagcccuuacacaucggagaacagggguggcaggcccgagagcgguuggugucuaucagugugagagccagcugguuguucuuguggaagauguccuuccacaaaaucguguccugguagcagagcuggggguuccgcuggaucaagaccccuccuuucaagaucucugugaggcuucgaagcugcagcucccgcaggccuccuggggaggccccugugacaggggugguauuguucagcgggucuccauugucuagcacggccagggcauaguuguccucaaagagcugggugccucgcacaauccgcagccucugcagugggaccugccucacuugguugugagcgaugagcacguagcccugcaccuccuggauauccugcaggaaggacaggcuggcauuggugggcagguaggugaguuccagguuucccugcaccaccuggcagcccugguagagguggcggagcauguccaggugggucucgggacuggcagggagccgcagcuucaugucugugccggugcacacuuguggcuuccaggacccccggggcauaucuucuggaaucuuugaaguaucucacuuuugugcauguccacaacaguacaugucacucucaucacugccugcgcaggcauggcugccagggucugagucucugugcugcacugcguuuguccuggccauucuacuggugcccccguuuuaucugugacucuuugcucagggaguagcuuugcauguggucuugaauauagcuuugcuuugccaccauucauuaaguggaaguggaucaucacaaagguuuucauccucaucaucuucacauugaguaggcauaagccaaauucugugcuggagguagaguggugaacaggacagcaaagguucuaccccgcauggggaagcaaucacccucgggaggugguacuucaauugcgacuggaggagccccagcaggaguagcaggacacccguuccgaagucuggcuccgucuaggaacccccagauuccuggauuuuauuucagauccacucccgcuucucuacaggugguaggagggugucccgacuucggacagagaagucagaggcgggggggagcccuguguguccagauuccaggcccaaggaaacuaaaauuaucuugggcagaugggggcgggu

SEQ ID NO: 2822 - RNA, 4693 nt, Homo sapiens
uagcuguuuuccaaaauauauuugcaaauggacaaaguggguguggagaaggaccccccacacuugccuccccauacaacacccauucucccccugggucuuuauuucaucuuuaaaaaaacaaaacaaaaaaaguaaaaacuaaacagaaaagcacucuguacaaagccuggauacugacaccauugcuguuccuuccucauggggggcaguacuagguuucagggacagucucugaaugggucgcuuuuguucuuagacacucccuuagggccgcuuccccucucaggccagcuucccuaaggcuuucaguacccaggaucuggaaggaaagggccaagcugggcuguggcauccacuggacccuagagucucauugggcagggccucagaauccacaaagacuccccagugcuguuccucuuccaacgaggcuggaccccuuccagccaucugggaacucaagcaggaaggaagguuccuuaggacagguuccuggcauggcagguuccccuggaaguggucggagggcccucccaccucuugaugccagcagaagucaggccuucccugcucccugaggacacaucagggcuucugcggacuuggccuucugguucacacuggcacguccagacccagguacucuggguucucugccguaggugucccuuugaaggugcuggguggagccccccgcucugguggguccuggucccaguaauagagguugucgaaggcugggcugaaggcaggaggaggguggggcugaggggcagcuccucccuggggugucaaguacucgggguucuccacggcacccccaaaggcaaaaacgucuuugacgaccccauucuucccuggggagagagucuugggccuuuccagaguggcaccagcaggucgggcagcaggcagagggcccucucggggcgaagggggcuggggccgaacaucuggcugguucacauauucaggcugggggcugcaggucaggggggcaacguagccaucagucucagagggcagggguacugugggguccucacuguaccgcuguagagggcuggggucauguguggggaggcuuugcagccccuuggcugcccccauucccaggucaccaucaaauacaucggagccagccccuucggagggugccaguggagaccugggggccuccucuucagagggcuccagcccuagugucagguccccaccgccacuccugguagaugagcugcggugccugugguggaccaugcccccagcgcccggggcagggucuggacagaagaagcccugcugggguaccagauacuccucagcauccaccaggucccccaugucaucguccuccagcagugagcgguagaaggugcuguccaagggacuggcugggcccaaguccucauucuggaugaccacaaagcgcugggggucccuggccaugcgggagaauucagacaccaacucccggaaucuuggccgacauucagagucaaucauccaacauuugaccaugaucauguagacaucaauggugcagauggggggcuggggcagccgcucccccuuuuccagcaggucagggaucucccgggcugggaucccaucguaagguuuggccccaaaagucaucagcucccacacagucacaccauaacuccacacaucacucuggugggugaaccgccggcggagaauggacuccagcgccauccacuugaugggcaccuugcccccaucugcaugguacucugucucgucaauguccagcagccgagccagcccgaagucuguaauuuugacaugguugggacucuugaccagcacguuccgagcggccaagucccuguguacgagccgcacauccuccagguagcucauccccuuggcaaucugcauacaccaguucagcagguccugggagcccaggcguccgcgguuuucccggacauggucuaagaggcagccauagggcauaagcugugucaccagcugcaccguggaugucaggcagaugcccagaaggcgggagacauauggggagcccacaccagccaucacguaugcuucgucuaagauuucuuuguuggcuuugggggauguguuuucccucaacacuuugauggccacuggaauuuucacauucuccccaucagggauccagaugcccuuguagacugugccaaaagcgccagauccaagcaccuucaccuuccucagcuccgucucuuucaggauccgcaucugcgccugguugggcaucgcuccgcuaggugucagcggcuccaccagcuccguuuccugcagcagucuccgcaucguguacuuccggaucuucugcugccgucgcuugaugaggaucccaaagaccacccccaagaccacgaccagcagaaugccaaccaccgcagagaugauggacgucagagggcuggcucucugcucggcggggcagcccuugucauccagguccacacaggagugggugcaguugauggggcaaggcuggcaugcgcccuccucaucuggaaacuuccagaugggcauguaggagaggucagguuucacaccgcuggggcagcgggccacgcagaagggaggguccuuauagugggcacaggccacacacuggucagccuccgguccaaaacaggucacugagccauucuggggcugacacucaggguggcacggcaaacagugccuggcauucacauacucccuggggagccccugcaguacucggcauuccuccacgcacuccuggccccgaaggaacuggcugcaguugacacacugggugggcccuggaccccagcagugcccucgggcgcacagcugguggcaggccaggcccucgcccacacacucguccucuggccgguuggcaguguggagcagagcuuggugcggguuccgaaagagcuggucccagggcaccgugugcacgaagcagagguggguguuaugguggaugagggccaguccacugcccaguucccucagugagcgcagccccagccagcugaugcccagcccuugcagggucagcgaguaggcgccauugugcagaauucguccccggauuacuugcagguucuggaagacgcugaggucaggcaggcuguccggccaugcugagauguauagguaaccugugaucucuuccagagucucaaacacuuggagcugcucuggcuggagcggggcaguguuggaggcuggguccccaucaaagcucuccggcagaaaugccaggcucccaaagaucuucuugcagccagcaaacuccuggauauuggcacugguaacugcccucaccucucgcaagugcuccaugcccagaccauagcacacucgggcacagggcuugcugcacuucucacaccgcuguguuccauccucugcugucaccucuugguugugcagggggcagacgagggugcaggaucccacguccguagaaagguaguuguagggacaggcagucacacagcuggcgccgaauguauaccggcccucgggauugggcauggacucaaacgugucuguguuguaggugaccagggcugggcagugcagcucacagaugccacugugguugaaguggaggcaggccaggcagucagagugcuuggggcccgugcagccggcagcacacugcucauggcagcagucagugggcaguggccccuugcagcgggcacagccaccggcacagacagugcgcgucaggcucugacaauccucagaacucucuccccagcagcgggagcccuuacacaucggagaacagggguggcaggcccgagagcgguuggugucuaucagugugagagccagcugguuguucuuguggaagauguccuuccacaaaaucguguccugguagcagagcuggggguuccgcuggaucaagaccccuccuuucaagaucucugugaggcuucgaagcugcagcucccgcaggccuccuggggaggccccugugacaggggugguauuguucagcgggucuccauugucuagcacggccagggcauaguuguccucaaagagcugggugccucgcacaauccgcagccucugcagugggaccugccucacuugguugugagcgaugagcacguagcccugcaccuccuggauauccugcaggaaggacaggcuggcauuggugggcagguaggugaguuccagguuucccugcaccaccuggcagcccugguagagguggcggagcauguccaggugggucucgggacuggcagggagccgcagcuucaugucugugccggugcacacuuguggcuuccaggacccccggggcauaucuucuggaaucuuugaaguaucucacuuuugugcauguccacaacaguacaugucacucucaucacugccugcgcaggcauggcugccagggucugagucucugugcugcacugcguuuguccuggccauucuacuggugcccccguuuuaucugugacucuuugcucagggaguagcuuugcauguggucuugaauauagcuuugcuuugccaccauucauuaaguggaaguggaucaucacaaagguuuucauccucaucaucuucacauugaguaggcugaaccccgagcgucaggacacccggcugggaccacgucuucagggagggagacgccaggcccuuaacu

SEQ ID NO: 2823 - RNA, 4848 nt, Homo sapiens
uagcuguuuuccaaaauauauuugcaaauggacaaaguggguguggagaaggaccccccacacuugccuccccauacaacacccauucucccccugggucuuuauuucaucuuuaaaaaaacaaaacaaaaaaaguaaaaacuaaacagaaaagcacucuguacaaagccuggauacugacaccauugcuguuccuuccucauggggggcaguacuagguuucagggacagucucugaaugggucgcuuuuguucuuagacacucccuuagggccgcuuccccucucaggccagcuucccuaaggcuuucaguacccaggaucuggaaggaaagggccaagcugggcuguggcauccacuggacccuagagucucauugggcagggccucagaauccacaaagacuccccagugcuguuccucuuccaacgaggcuggaccccuuccagccaucugggaacucaagcaggaaggaagguuccuuaggacagguuccuggcauggcagguuccccuggaaguggucggagggcccucccaccucuugaugccagcagaagucaggccuucccugcucccugaggacacaucagggcuucugcggacuuggccuucugguucacacuggcacguccagacccagguacucuggguucucugccguaggugucccuuugaaggugcuggguggagccccccgcucugguggguccuggucccaguaauagagguugucgaaggcugggcugaaggcaggaggaggguggggcugaggggcagcuccucccuggggugucaaguacucgggguucuccacggcacccccaaaggcaaaaacgucuuugacgaccccauucuucccuggggagagagucuugggccuuuccagaguggcaccagcaggucgggcagcaggcagagggcccucucggggcgaagggggcuggggccgaacaucuggcugguucacauauucaggcugggggcugcaggucaggggggcaacguagccaucagucucagagggcagggguacugugggguccucacuguaccgcuguagagggcuggggucauguguggggaggcuuugcagccccuuggcugcccccauucccaggucaccaucaaauacaucggagccagccccuucggagggugccaguggagaccugggggccuccucuucagagggcuccagcccuagugucagguccccaccgccacuccugguagaugagcugcggugccugugguggaccaugcccccagcgcccggggcagggucuggacagaagaagcccugcugggguaccagauacuccucagcauccaccaggucccccaugucaucguccuccagcagugagcgguagaaggugcuguccaagggacuggcugggcccaaguccucauucuggaugaccacaaagcgcugggggucccuggccaugcgggagaauucagacaccaacucccggaaucuuggccgacauucagagucaaucauccaacauuugaccaugaucauguagacaucaauggugcagauggggggcuggggcagccgcucccccuuuuccagcaggucagggaucucccgggcugggaucccaucguaagguuuggccccaaaagucaucagcucccacacagucacaccauaacuccacacaucacucuggugggugaaccgccggcggagaauggacuccagcgccauccacuugaugggcaccuugcccccaucugcaugguacucugucucgucaauguccagcagccgagccagcccgaagucuguaauuuugacaugguugggacucuugaccagcacguuccgagcggccaagucccuguguacgagccgcacauccuccagguagcucauccccuuggcaaucugcauacaccaguucagcagguccugggagcccaggcguccgcgguuuucccggacauggucuaagaggcagccauagggcauaagcugugucaccagcugcaccguggaugucaggcagaugcccagaaggcgggagacauauggggagcccacaccagccaucacguaugcuucgucuaagauuucuuuguuggcuuugggggauguguuuucccucaacacuuugauggccacuggaauuuucacauucuccccaucagggauccagaugcccuuguagacugugccaaaagcgccagauccaagcaccuucaccuuccucagcuccgucucuuucaggauccgcaucugcgccugguugggcaucgcuccgcuaggugucagcggcuccaccagcuccguuuccugcagcagucuccgcaucguguacuuccggaucuucugcugccgucgcuugaugaggaucccaaagaccacccccaagaccacgaccagcagaaugccaaccaccgcagagaugauggacgucagagggcuggcucucugcucggcggggcagcccuugucauccagguccacacaggagugggugcaguugauggggcaaggcuggcaugcgcccuccucaucuggaaacuuccagaugggcauguaggagaggucagguuucacaccgcuggggcagcgggccacgcagaagggaggguccuuauagugggcacaggccacacacuggucagccuccgguccaaaacaggucacugagccauucuggggcugacacucaggguggcacggcaaacagugccuggcauucacauacucccuggggagccccugcaguacucggcauuccuccacgcacuccuggccccgaaggaacuggcugcaguugacacacugggugggcccuggaccccagcagugcccucgggcgcacagcugguggcaggccaggcccucgcccacacacucguccucuggccgguuggcaguguggagcagagcuuggugcggguuccgaaagagcuggucccagggcaccgugugcacgaagcagagguggguguuaugguggaugagggccaguccacugcccaguucccucagugagcgcagccccagccagcugaugcccagcccuugcagggucagcgaguaggcgccauugugcagaauucguccccggauuacuugcagguucuggaagacgcugaggucaggcaggcuguccggccaugcugagauguauagguaaccugugaucucuuccagagucucaaacacuuggagcugcucuggcuggagcggggcaguguuggaggcuggguccccaucaaagcucuccggcagaaaugccaggcucccaaagaucuucuugcagccagcaaacuccuggauauuggcacugguaacugcccucaccucucgcaagugcuccaugcccagaccauagcacacucgggcacagggcuugcugcacuucucacaccgcuguguuccauccucugcugucaccucuugguugugcagggggcagacgagggugcaggaucccacguccguagaaagguaguuguagggacaggcagucacacagcuggcgccgaauguauaccggcccucgggauugggcauggacucaaacgugucuguguuguaggugaccagggcugggcagugcagcucacagaugccacugugguugaaguggaggcaggccaggcagucagagugcuuggggcccgugcagccggcagcacacugcucauggcagcagucagugggcaguggccccuugcagcgggcacagccaccggcacagacagugcgcgucaggcucugacaauccucagaacucucuccccagcagcgggagcccuuacacaucggagaacagggguggcaggcccgagagcgguuggugucuaucagugugagagccagcugguuguucuuguggaagauguccuuccacaaaaucguguccugguagcagagcuggggguuccgcuggaucaagaccccuccuuucaagaucucugugaggcuucgaagcugcagcucccgcaggccuccuggggaggccccugugacaggggugguauuguucagcgggucuccauugucuagcacggccagggcauaguuguccucaaagagcugggugccucgcacaauccgcagccucugcagugggaccugccucacuugguugugagcgaugagcacguagcccugcaccuccuggauauccugcaggaaggacaggcuggcauuggugggcagguaggugaguuccagguuucccugcaccaccuggcagcccugguagagguggcggagcauguccaggugggucucgggacuggcagggagccgcagcuucaugucugugccggugcacacuuguggcuuccaggacccccggggcauaucuucuggaaucuuugaaguaucucacuuuugugcauguccacaacaguacaugucacucucaucacugccugcgcaggcauggcugccagggucugagucucugugcugcacugcguuuguccuggccauucuacuggugcccccguuuuaucugugacucuuugcucagggaguagcuuugcauguggucuugaauauagcuuugcuuugccaccauucauuaaguggaaguggaucaucacaaagguuuucauccucaucaucuucacauugaguaggcuggaggagccccagcaggaguagcaggacacccguuccgaagucuggcuccgucuaggaacccccagauuccuggauuuuauuucagauccacucccgcuucucuacaggugguaggagggugucccgacuucggacagagaagucagaggcgggggggagcccuguguguccagauuccaggcccaaggaaacuaaaauuaucuugggcagaugggggcgggu

SEQ ID NO: 2824 - RNA, 4601 nt, Homo sapiens
uagcuguuuuccaaaauauauuugcaaauggacaaaguggguguggagaaggaccccccacacuugccuccccauacaacacccauucucccccugggucuuuauuucaucuuuaaaaaaacaaaacaaaaaaaguaaaaacuaaacagaaaagcacucuguacaaagccuggauacugacaccauugcuguuccuuccucauggggggcaguacuagguuucagggacagucucugaaugggucgcuuuuguucuuagacacucccuuagggccgcuuccccucucaggccagcuucccuaaggcuuucaguacccaggaucuggaaggaaagggccaagcugggcuguggcauccacuggacccuagagucucauugggcagggccucagaauccacaaagacuccccagugcuguuccucuuccaacgaggcuggaccccuuccagccaucugggaacucaagcaggaaggaagguuccuuaggacagguuccuggcauggcagguuccccuggaaguggucggagggcccucccaccucuugaugccagcagaagucaggccuucccugcucccugaggacacaucagggcuucugcggacuuggccuucugguucacacuggcacguccagacccagguacucuggguucucugccguaggugucccuuugaaggugcuggguggagccccccgcucugguggguccuggucccaguaauagagguugucgaaggcugggcugaaggcaggaggaggguggggcugaggggcagcuccucccuggggugucaaguacucgggguucuccacggcacccccaaaggcaaaaacgucuuugacgaccccauucuucccuggggagagagucuugggccuuuccagaguggcaccagcaggucgggcagcaggcagagggcccucucggggcgaagggggcuggggccgaacaucuggcugguucacauauucaggcugggggcugcaggucaggggggcaacguagccaucagucucagagggcagggguacugugggguccucacuguaccgcuguagagggcuggggucauguguggggaggcuuugcagccccuuggcugcccccauucccaggucaccaucaaauacaucggagccagccccuucggagggugccaguggagaccugggggccuccucuucagagggcuccagcccuagugucagguccccaccgccacuccugguagaugagcugcggugccugugguggaccaugcccccagcgcccggggcagggucuggacagaagaagcccugcugggguaccagauacuccucagcauccaccaggucccccaugucaucguccuccagcagugagcgguagaaggugcuguccaagggacuggcugggcccaaguccucauucuggaugaccacaaagcgcugggggucccuggccaugcgggagaauucagacaccaacucccggaaucuuggccgacauucagagucaaucauccaacauuugaccaugaucauguagacaucaauggugcagauggggggcuggggcagccgcucccccuuuuccagcaggucagggaucucccgggcugggaucccaucguaagguuuggccccaaaagucaucagcucccacacagucacaccauaacuccacacaucacucuggugggugaaccgccggcggagaauggacuccagcgccauccacuugaugggcaccuugcccccaucugcaugguacucugucucgucaauguccagcagccgagccagcccgaagucuguaauuuugacaugguugggacucuugaccagcacguuccgagcggccaagucccuguguacgagccgcacauccuccagguagcucauccccuuggcaaucugcauacaccaguucagcagguccugggagcccaggcguccgcgguuuucccggacauggucuaagaggcagccauagggcauaagcugugucaccagcugcaccguggaugucaggcagaugcccagaaggcgggagacauauggggagcccacaccagccaucacguaugcuucgucuaagauuucuuuguuggcuuugggggauguguuuucccucaacacuuugauggccacuggaauuuucacauucuccccaucagggauccagaugcccuuguagacugugccaaaagcgccagauccaagcaccuucaccuuccucagcuccgucucuuucaggauccgcaucugcgccugguugggcaucgcuccgcuaggugucagcggcuccaccagcuccguuuccugcagcagucuccgcaucguguacuuccggaucuucugcugccgucgcuugaugaggaucccaaagaccacccccaagaccacgaccagcagaaugccaaccaccgcagagaugauggacgucagagggcuggcucucugcucggcggggcagcccuugucauccagguccacacaggagugggugcaguugauggggcaaggcuggcaugcgcccuccucaucuggaaacuuccagaugggcauguaggagaggucagguuucacaccgcuggggcagcgggccacgcagaagggaggguccuuauagugggcacaggccacacacuggucagccuccgguccaaaacaggucacugagccauucuggggcugacacucaggguggcacggcaaacagugccuggcauucacauacucccuggggagccccugcaguacucggcauuccuccacgcacuccuggccccgaaggaacuggcugcaguugacacacugggugggcccuggaccccagcagugcccucgggcgcacagcugguggcaggccaggcccucgcccacacacucguccucuggccgguuggcaguguggagcagagcuuggugcggguuccgaaagagcuggucccagggcaccgugugcacgaagcagagguggguguuaugguggaugagggccaguccacugcccaguucccucagugagcgcagccccagccagcugaugcccagcccuugcagggucagcgaguaggcgccauugugcagaauucguccccggauuacuugcagguucuggaagacgcugaggucaggcaggcuguccggccaugcugagauguauagguaaccugugaucucuuccagagucucaaacacuuggagcugcucuggcuggagcggggcaguguuggaggcuggguccccaucaaagcucuccggcagaaaugccaggcucccaaagaucuucuugcagccagcaaacuccuggauauuggcacugguaacugcccucaccucucgcaagugcuccaugcccagaccauagcacacucgggcacagggcuugcugcacuucucacaccgcuguguuccauccucugcugucaccucuugguugugcagggggcagacgagggugcaggaucccacguccguagaaagguaguuguagggacaggcagucacacagcuggcgccgaauguauaccggcccucgggauugggcauggacucaaacgugucuguguuguaggugaccagggcugggcagugcagcucacagaugccacugugguugaaguggaggcaggccaggcagucagagugcuuggggcccgugcagccggcagcacacugcucauggcagcagucagugggcaguggccccuugcagcgggcacagccaccggcacagacagugcgcgucaggcucugacaauccucagaacucucuccccagcagcgggagcccuuacacaucggagaacagggguggcaggcccgagagcgguuggugucuaucagugugagagccagcugguuguucuuguggaagauguccuuccacaaaaucguguccugguagcagagcuggggguuccgcuggaucaagaccccuccuuucaagaucucugugaggcuucgaagcugcagcucccgcaggccuccuggggaggccccugugacaggggugguauuguucagcgggucuccauugucuagcacggccagggcauaguuguccucaaagagcugggugccucgcacaauccgcagccucugcagugggaccugccucacuugguugugagcgaugagcacguagcccugcaccuccuggauauccuguaaacagagggcucagcccagcuggaggcagggccuggcuggguugcccacgggccucaccugcaggaaggacaggcuggcauuggugggcagguaggugaguuccagguuucccugcaccaccuggcagcccugguagagguggcggagcauguccaggugggucucgggacuggcagggagccgcagcuucaugucugugccggugcacacuggaggagccccagcaggaguagcaggacacccguuccgaagucuggcuccgucuaggaacccccagauuccuggauuuuauuucagauccacucccgcuucucuacaggugguaggagggugucccgacuucggacagagaagucagaggcgggggggagcccuguguguccagauuccaggcccaaggaaacuaaaauuaucuugggcagaugggggcgggu

SEQ ID NO: 2825 - RNA, 528 nt, Homo sapiens
uuaaaagccagauuuuauuucuauuuaaaaacaaugcucaggagacuuaguuccaaagacgaagaugccaggguucaauguacaacuacagcgaggugcuagcgauuauugagugagucauggaaggcucuguaguuccuuggagacuuccgcuuuuucguaucacuccuagucuuagccucgugguuuucugcaaguucucgucgacuguaaccguacacagggcugucacuccagugaggacaacaaaaaaagcaccuauggcuaucauuguuaauccaguagagaaaaccacagagucagagggguccuguagaacaacaaugagucccagaaucacagucgauaacccuaagcaggugacaagcagacauucagagcaagacaagcaucggaacucccgucuucuggauagauucauccauggauaaguuuggauagguugguacauggugauuuuuugcgccgcccgcgccgccugucgagccgggaggucugagcuggccucucgggcgccccgagaaaagg

SEQ ID NO: 2826 - RNA, 598 nt, Homo sapiens
uuaaaagccagauuuuauuucuauuuaaaaacaaugcucaggagacuuaguuccaaagacgaagaugccaggguucaauguacaacuacagcgaggugcuagcgauuauugagugagucauggaaggcucuguaguuccuuggagacuuccgcuuuuucguaucacuccuagucuuagccucgugguuuucugcaaguucucgucgacuguaaccguacacagggcugucacuccagugaggacaacaaaaaaagcaccuauggcuaucauuguuaauccaguagagaaaaccacagagucagagggguccuguagaacaacaaugagucccagaaucacagucgauaacccuaagcaggugacaagcagacauucagagcaagacaagcaucggaacucccgucuucuggauagauucauccauggauaaguuuggauagguugguacauggugauuuuuugcugguacagcaggcaacuuuuuagucaaaauaaggucaggaauaguuuccccaaaacagccagacacccucgccgcccgcgccgccugucgagccgggaggucugagcuggccucucgggcgccccgagaaaagg

SEQ ID NO: 2827 - RNA, 592 nt, Homo sapiens
uuaaaagccagauuuuauuucuauuuaaaaacaaugcucaggagacuuaguuccaaagacgaagaugccaggguucaauguacaacuacagcgaggugcuagcgauuauugagugagucauggaaggcucuguaguuccuuggagacuuccgcuuuuucguaucacuccuagucuuagccucgugguuuucugcaaguucucgucgacuguaaccguacacagggcugucacuccagugaggacaacaaaaaaagcaccuauggcuaucauuguuaauccaguagagaaaaccacagagucagagggguccuguagaacaacaaugagucccagaaucacagucgauaacccuaagcaggugacaagcagacauucagagcaagacaagcaucggaacucccgucuucuggauagauucauccauggauaaguuuggauagguugguacauggugauuuuuugcucgaccccggacccgcgcuggggcgcucccggcccucuggagggcggcccuucucuuccuguaacucuacagacgcguccggacagaccaagacacucucugugccuucgggcauguuacccauccuc

SEQ ID NO: 2828 - RNA, 691 nt, Homo sapiens
uuaaaagccagauuuuauuucuauuuaaaaacaaugcucaggagacuuaguuccaaagacgaagaugccaggguucaauguacaacuacagcgaggugcuagcgauuauugagugagucauggaaggcucuguaguuccuuggagacuuccgcuuuuucguaucacuccuagucuuagccucgugguuuucugcaaguucucgucgacuguaaccguacacagggcugucacuccagugaggacaacaaaaaaagcaccuauggcuaucauuguuaauccaguagagaaaaccacagagucagagggguccuguagaacaacaaugagucccagaaucacagucgauaacccuaagcaggugacaagcagacauucagagcaagacaagcaucggaacucccgucuucuggauagauucauccauggauaaguuuggauagguugguacauggugauuuuuugccagcaccggcgguggacggugagcggcgucugggcccagagcugggugccaucagcaguaagaggaccccugcgcucgcggggugcccgccuuaccccgcggggaggggucaggccuaggggccacggcccgcuucgcucucugauuuucaccuccccagggucucccaggggccucggguguccuucccggaucuugcgcgaagucgcgggggcagggagagaaac

SEQ ID NO: 2829 - RNA, 1446 nt, Homo sapiens
cauuguauaauuuaaaagcuuuauuuccccccauaauuugcaaauagauuucauauuaguuccacuggaaguuuucuucguacaguugccuuucucauugacuaugcuguugguggggaaaacugcuuucucaugaggggaaggguuagauuucauagagaugcucugagcuaaucacauaaacaagaggguuugaccuggcagccucugaggcagucaaggaggucaagaaauccuuucagcuaaaggccuagucaggugggacuaguugccaggauccucucugcagaacugcccaaacguagcucucuuugaccaggaagccuggaagucagaccaucuucucaggcccugccaaauucccauccucaguccuguggccucaugcgggaacauuuuauccaagcaaaccacuggcuuucgccuugagguccaaugugcacucuucaccaagugcaagauugaucuucacuccaaaguucaccguucacacaguuuuuggcuugugcuuuagaggcuggucucugccucuccuaggaaugguggcaucacagcaauggaagcacaaagacccaggcaagcacugguagguagagugugggggcacugcugccagauguucucugagcgugcauuacggcaaacacugcauuagugugauugguggguaauucuacauugcagaucauuccuucacagcaagaccuacacuccguauguucagaaucucggcugugguggcaaccgacaaaaugacauucacuucuggaggcacacuuuuuggugauggaugugcuucuuccguggcuggugaagugaugaacugucaaacaguacuguguauuuuguggacaccauuugucuucugcccaucgauugcaguuauaauuauccccugcguuuucacaaguaaagcacuugaagcuauuuggaaaugguguagggucgagaggaggccucacauuauagaaguugauguucuuggcaaaugcccagcuuucugagaagauaacgaucuggacaacagcuauagcgagagcgugacagaggagcagcaugcugaccuugugugcugggcgguccgaacucuuauaucuugagaaggagaaugugguugucaggcuccucucuggaacagugaaaagguuugcacucagaguaaucagcaacauccaugugauuaacaagagcagccuaguccaggaggguugccaacagcaggcagaaguguggcauauccgggcugcgcgcggauuccggccgccagcugcagcccgcugccccaucccacgaacacugcggcgcccccagagugugcaaugcggcgccccgccagcccgcugccggagcccgggagcucagggaaggagcgagggagcgcagcggggagaggcggggggcggcuaggggcgcgcgcgccacucccacucgcgccgggcacuggcc

SEQ ID NO: 2830 - RNA, 1303 nt, Homo sapiens
cauuguauaauuuaaaagcuuuauuuccccccauaauuugcaaauagauuucauauuaguuccacuggaaguuuucuucguacaguugccuuucucauugacuaugcuguugguggggaaaacugcuuucucaugaggggaaggguuagauuucauagagaugcucugagcuaaucacauaaacaagaggguuugaccuggcagccucugaggcagucaaggaggucaagaaauccuuucagcuaaaggccuagucaggugggacuaguugccaggauccucucugcagaacugcccaaacguagcucucuuugaccaggaagccuggaagucagaccaucuucucaggcccugccaaauucccauccucaguccuguggccucaugcgggaacauuuuauccaagcaaaccacuggcuuucgccuugagguccaaugugcacucuucaccaagugcaagauugaucuucacuccaaaguucaccguucacacaguuuuuggcuugugcuuuagaggcuggucucugccucuccuaggaaugguggcaucacagcaauggaagcacaaagacccaggcaagcacugguagguagagugugggggcacugcugccagauguucucugagcgugcauuacggcaaacacugcauuagugugauugguggguaauucuacauugcagaucauuccuucacagcaagaccuacacuccguauguucagaaucucggcugugguggcaaccgacaaaaugacauucacuucuggaggcacacuuuuuggugauggaugugcuucuuccguggcuggugaagugaugaacugucaaacaguacuguguauuuuguggacaccauuugucuucugcccaucgauugcaguuauaauuauccccugcguuuucacaaguaaagcacuugaagcuauuuggaaaugguguagggucgagaggaggccucacauuauagaaguugauguucuuggcaaaugcccagcuuucugagaagauaacgaucuggacaacagcuauagcgagagcgugacagaggagcagcaugcugaccuugugugcugggcgguccgaacucuuauauccgggcugcgcgcggauuccggccgccagcugcagcccgcugccccaucccacgaacacugcggcgcccccagagugugcaaugcggcgccccgccagcccgcugccggagcccgggagcucagggaaggagcgagggagcgcagcggggagaggcggggggcggcuaggggcgcgcgcgccacucccacucgcgccgggcacuggcc

SEQ ID NO: 2831 - RNA, 1435 nt, Homo sapiens
cauuguauaauuuaaaagcuuuauuuccccccauaauuugcaaauagauuucauauuaguuccacuggaaguuuucuucguacaguugccuuucucauugacuaugcuguugguggggaaaacugcuuucucaugaggggaaggguuagauuucauagagaugcucugagcuaaucacauaaacaagaggguuugaccuggcagccucugaggcagucaaggaggucaagaaauccuuucagcuaaaggccuagucaggugggacuaguugccaggauccucucugcagaacugcccaaacguagcucucuuugaccaggaagccuggaagucagaccaucuucucaggcccugccaaauucccauccucaguccuguggccucaugcgggaacauuuuauccaagcaaaccacuggcuuucgccuugagguccaaugugcacucuucaccaagugcaagauugaucuucacuccaaaguucaccguucacacaguuuuuggcuugugcuuuagaggcuggucucugccucuccuaggaaugguggcaucacagcaauggaagcacaaagacccaggcaagcacugguagguagagugugggggcacugcugccagauguucucugagcgugcauuacggcaaacacugcauuagugugauugguggguaauucuacauugcagaucauuccuucacagcaagaccuacacuccguauguucagaaucucggcugugguggcaaccgacaaaaugacauucacuucuggaggcacacuuuuuggugauggaugugcuucuuccguggcuggugaagugaugaacugucaaacaguacuguguauuuuguggacaccauuugucuucugcccaucgauugcaguuauaauuauccccugcguuuucacaaguaaagcacuugaagcuauuuggaaaugguguagggucgagaggaggccucacauuauagaaguugauguucuuggcaaaugcccagcuuucugagaagauaacgaucuggacaacagcuauagcgagagcgugacagaggagcagcaugcugaccuugugugcugggcgguccgaacucuuauauaacauccaugugauuaacaagagcagccuaguccaggaggguugccaacagcaggcagaaguguggcauaucuggauaggcaguuauuguuuuaacagggucaagauuaaugggcagguguuccgcgauaauccgggcugcgcgcggauuccggccgccagcugcagcccgcugccccaucccacgaacacugcggcgcccccagagugugcaaugcggcgccccgccagcccgcugccggagcccgggagcucagggaaggagcgagggagcgcagcggggagaggcggggggcggcuaggggcgcgcgcgccacucccacucgcgccgggcacuggcc

SEQ ID NO: 2832 - RNA, 1804 nt, Homo sapiens
cauuguauaauuuaaaagcuuuauuuccccccauaauuugcaaauagauuucauauuaguuccacuggaaguuuucuucguacaguugccuuucucauugacuaugcuguugguggggaaaacugcuuucucaugaggggaaggguuagauuucauagagaugcucugagcuaaucacauaaacaagaggguuugaccuggcagccucugaggcagucaaggaggucaagaaauccuuucagcuaaaggccuagucaggugggacuaguugccaggauccucucugcagaacugcccaaacguagcucucuuugaccaggaagccuggaagucagaccaucuucucaggcccugccaaauucccauccucaguccuguggccucaugcgggaacauuuuauccaagcaaaccacuggcuuucgccuugagguccaaugugcacucuucaccaagugcaagauugaucuucacuccaaaguucaccguucacacaguuuuuggcuugugcuuuagaggcuggucucugccucuccuaggaaugguggcaucacagcaauggaagcacaaagacccaggcaagcacugguagguagagugugggggcacugcugccagauguucucugagcgugcauuacggcaaacacugcauuagugugauugguggguaauucuacauugcagaucauuccuucacagcaagaccuacacuccguauguucagaaucucggcugugguggcaaccgacaaaaugacauucacuucuggaggcacacuuuuuggugauggaugugcuucuuccguggcuggugaagugaugaacugucaaacaguacuguguauuuuguggacaccauuugucuucugcccaucgauugcaguuauaauuauccccugcguuuucacaaguaaagcacuugaagcuauuuggaaaugguguagggucgagaggaggccucacauuauagaaguugauguucuuggcaaaugcccagcuuucugagaagauaacgaucuggacaacagcuauagcgagagcgugacagaggagcagcaugcugaccuugugugcugggcgguccgaacucuuauaucucgagggcaguagaugucuggagcccaucgguugcacucauaauugucugcugccuuuucacaggugaaacauuuaaauccaccaggauauggugugguugaaggauggagguagauaaugucuuucacugugaagucucgggacugagcagcuuucagacaauccgccagcaggcucaggagcaggagccaggccagagcagggccagguuccauggcagacugaagugucacucauacagagggccugggagugggcacucagggcaacaggagagaacuugcacaguucuagacggugggaauuccaagaucagggcaccagcagauuccgugucuggugagggcuguucucugcuuccaaaauagugccuuguugcucacccugcaacuuaggauuagguuuacagccucugugcucacacaguagcuuuugcauaacuuuuucucaggcuuuuugaugauauucgguaauugugcacuuccaucugugucucuuccauaagacuguaaguuccuuaaaggaagagacggugucuuucuucuacuuauauucacgguaccuuugaaaaugagaaggaaaagauaaggguauguuuuuucccauuguuuugcuggagcucggaagccucuucuuucucuugcuugagauugcucaaggagguuguucuuuaugugcauuuacagagugguuggucuuucaugccc

SEQ ID NO: 2833 - RNA, 1313 nt, Homo sapiens
cauuguauaauuuaaaagcuuuauuuccccccauaauuugcaaauagauuucauauuaguuccacuggaaguuuucuucguacaguugccuuucucauugacuaugcuguugguggggaaaacugcuuucucaugaggggaaggguuagauuucauagagaugcucugagcuaaucacauaaacaagaggguuugaccuggcagccucugaggcagucaaggaggucaagaaauccuuucagcuaaaggccuagucaggugggacuaguugccaggauccucucugcagaacugcccaaacguagcucucuuugaccaggaagccuggaagucagaccaucuucucaggcccugccaaauucccauccucaguccuguggccucaugcgggaacauuuuauccaagcaaaccacuggcuuucgccuugagguccaaugugcacucuucaccaagugcaagauugaucuucacuccaaaguucaccguucacacaguuuuuggcuugugcuuuagaggcuggucucugccucuccuaggaaugguggcaucacagcaauggaagcacaaagacccaggcaagcacugguagguagagugugggggcacugcugccagauguucucugagcgugcauuacggcaaacacugcauuagugugauugguggguaauucuacauugcagaucauuccuucacagcaagaccuacacuccguauguucagaaucucggcugugguggcaaccgacaaaaugacauucacuucuggaggcacacuuuuuggugauggaugugcuucuuccguggcuggugaagugaugaacugucaaacaguacuguguauuuuguggacaccauuugucuucugcccaucgauugcaguuauaauuauccccugcguuuucacaaguaaagcacuugaagcuauuuggaaaugguguagggucgagaggaggccucacauuauagaaguugauguucuuggcaaaugcccagcuuucugagaagauaacgaucuggacaacagcuauagcgagagcgugacagaggagcagcaugcugaccuugugugcugggcgguccgaacucuuauaucuuccugugcgcgacccccuggcgccucucccuagccgccagccucagccgggccagcagcugcgugcguggcugcaggcccggcagugugaaaugacccuggccaaaucucacuccccgccauccccugggccccgcgaaauccgccggaccgcagagcucaagagcaagugaagcuccgaacccagggaaggcggagaccacuugacguuugcagu

SEQ ID NO: 2834 - RNA, 1848 nt, Homo sapiens; identical to SEQ ID NO: 2062

SEQ ID NO: 2835 - RNA, 1947 nt, Homo sapiens
cauuguauaauuuaaaagcuuuauuuccccccauaauuugcaaauagauuucauauuaguuccacuggaaguuuucuucguacaguugccuuucucauugacuaugcuguugguggggaaaacugcuuucucaugaggggaaggguuagauuucauagagaugcucugagcuaaucacauaaacaagaggguuugaccuggcagccucugaggcagucaaggaggucaagaaauccuuucagcuaaaggccuagucaggugggacuaguugccaggauccucucugcagaacugcccaaacguagcucucuuugaccaggaagccuggaagucagaccaucuucucaggcccugccaaauucccauccucaguccuguggccucaugcgggaacauuuuauccaagcaaaccacuggcuuucgccuugagguccaaugugcacucuucaccaagugcaagauugaucuucacuccaaaguucaccguucacacaguuuuuggcuugugcuuuagaggcuggucucugccucuccuaggaaugguggcaucacagcaauggaagcacaaagacccaggcaagcacugguagguagagugugggggcacugcugccagauguucucugagcgugcauuacggcaaacacugcauuagugugauugguggguaauucuacauugcagaucauuccuucacagcaagaccuacacuccguauguucagaaucucggcugugguggcaaccgacaaaaugacauucacuucuggaggcacacuuuuuggugauggaugugcuucuuccguggcuggugaagugaugaacugucaaacaguacuguguauuuuguggacaccauuugucuucugcccaucgauugcaguuauaauuauccccugcguuuucacaaguaaagcacuugaagcuauuuggaaaugguguagggucgagaggaggccucacauuauagaaguugauguucuuggcaaaugcccagcuuucugagaagauaacgaucuggacaacagcuauagcgagagcgugacagaggagcagcaugcugaccuugugugcugggcgguccgaacucuuauaucuugagaaggagaaugugguugucaggcuccucucuggaacagugaaaagguuugcacucagaguaaucagcaacauccaugugauuaacaagagcagccuaguccaggaggguugccaacagcaggcagaaguguggcauaucucgagggcaguagaugucuggagcccaucgguugcacucauaauugucugcugccuuuucacaggugaaacauuuaaauccaccaggauauggugugguugaaggauggagguagauaaugucuuucacugugaagucucgggacugagcagcuuucagacaauccgccagcaggcucaggagcaggagccaggccagagcagggccagguuccauggcagacugaagugucacucauacagagggccugggagugggcacucagggcaacaggagagaacuugcacaguucuagacggugggaauuccaagaucagggcaccagcagauuccgugucuggugagggcuguucucugcuuccaaaauagugccuuguugcucacccugcaacuuaggauuagguuuacagccucugugcucacacaguagcuuuugcauaacuuuuucucaggcuuuuugaugauauucgguaauugugcacuuccaucugugucucuuccauaagacuguaaguuccuuaaaggaagagacggugucuuucuucuacuuauauucacgguaccuuugaaaaugagaaggaaaagauaaggguauguuuuuucccauuguuuugcuggagcucggaagccucuucuuucucuugcuugagauugcucaaggagguuguucuuuaugugcauuuacagagugguuggucuuucaugccc

SEQ ID NO: 2836 - RNA, 2614 nt, Homo sapiens
uaggguuuaaaaaggggcuuguuuaauuaauuaaauacaaggaugaggccaggcagggcgggggaggggcgccacccacggaaagcacacgccucucggagccgccuccccugcaaacggcuggaaccaggucccagugaucagcgacuccugggagaguggaggggugggcgcaggucucuccaagccccuggacacuggagaggggcccaguuauagaguucuggaacccacagcccuaccuaccccugcuccagacaggccccugccagggcuggggccaaccaagacucacaaaggaaaacggggccccagucccccacccacccccacagacuaaggcaucucacuagcgcugccagaagaggguuugaggcuagggacagagaacacagagagccgagggcuggauggggcaggacccuccgagcccagcuccagaagggcguccccugccucccuccccccaggaucccaggcacccaucccuggauccugccaggccggggcuggguccaggugcacaccagugccauccaaagccccccuguccccaagcgagaggcaggacgguucuggaacaaaaggggguaccaaaaaccuccugcagccaacaguggggggauccaccuuucugggucugacauggaaccggggacccuucucauuccaggcuggggguccucaauaccccccccaagaggaaaugcaacccaggccacagcaggacgaccgcugacaaggacacaaagguggcccccgaggaacaaguccccaccccacccaaguucagcucagagaccccccacacacacucacacccccugaggaugccggaccacccaugggggcccagaaaaaaaggaauccgugccugaaaaaauauucuacccggugcaaaaaaaacgagcuaccccaggaggcugcacagccagcccucugcuuccaguccacgaggcaagaccucaaccacgggccaggacccaccucuuccaagcacccaggagaaggaggggaggccagggaagcagggccgggccaggcugcagcccaggcccggaagagccugcaaccccggcgggcaugggcuccacggccccaccugcaggccagggagggcagcgcagcccaacagccgcagucgucguuaagggagaguugauugucacgugauaccgcaacggccaaagucagcaaggcagggacuggaggcccaagcccggugccagccuccccugcagccucucucacccacccacccagagagggcgagcuagggcccccacacccgaggacagaggaaaauaaauaagccaggauucccucccgaccccacugagucaaauguucuuuggaagaacccagagguccccucccuccccaucccaggucucagaagcaacaccuggagccccuccgggcauccuaacgcugccccacuccuggcucuacccccgaggucuggggggccaggcagccccuaccgugggcagaacuuguggacaccugagauugaguacccgaaugggggguggcugggcugcacccccauuucccugaacuacucccauggcuuucgguggggugggggugggguggggagaggcaggggccgugucaacccccgacuccucuauggcugucugaacacuucaucccaaucugcagggauggggcagggggugcuuuccccgggccggcucccagaaguccacuccacccccccaaaccccaccccgggaggggggcagcagggggugguggagaggagaggggaggaccuccuagcugcccugggggggccccguugcacagaugggaagaaaguuaguaucauggcuauuuacagacacaagcccccgucacccauccugagagccaccucugaggucaggcagacccagguccagucucaggcccccuccucacucucuggaggggggcaggggugucuucaggguuugcccacggcuggaaggggcccaggcuccccguggguccucacuacaccccuggauggcagaagcauccuggcggucagggugggcugcacgagggcccuacaggccugcgggggcugggcugggcgcggggcugggcgcagggcucccggccaggcugcagggcagcgagucgcugggggagguacugcgggcaccagggcgccggagcagguccggguggaagccgggguggcggcgggcgugcuuggccagguggucacugcgggugaagcgcuuggagcacagagggcaggagaagcgcuucucgcccgugugcguccggugguggcgggccagcucgucggagcgggcgaacuucuugucgcagcccugccagucacaagcaaaagggcguuccccugcugcggggggcgccucuccgccgucaccgggcgcgccggagccccgggccccgcggugccggaaguggcaguagggccgccggcagggccccccgggcgccccagaccaauaggggcagucaauggcccggaagaagccaguggagcguagcaugguccgucccgcggcggggccccggcccggagccgcccgggccccagggcccccucacuggcgccgcggucgccgccgcccgcgccucacggacc

SEQ ID NO: 2837 - RNA, 1525 nt, Homo sapiens
gugauuuuaaaucuuuaaucaaauuccaaagguuaucagccauauuacaugccaugauuagcuuucuauaagcaauuuuuuuuacuguguacagaucggugucaaugaaauaaaaaaauaaaacuguauacuaggcaaagaacuuuauuaaucuuuguuucaaacuugauucccaggcuucuucggcuuaauuagcugcaaagaaugaauuguguauaagcaaaaacugaaaagagcugcaguguccaaggggcuugggcuuaaaaauauuagagaucuagauuuuaucagauccauaaacaaaaauuucuuaaaaagcagucauaauauaaaauagcagcucccaguaacuucuucagguuuuaucuucagaaguugacucaauucaguuugccucauucuuggaagccucaucaaaauucuccacaagaucuggaacuucaucaucaucauccucuccaguagcaaguggugcuuuuccauccacagauuguuugggcagagcuucggccagucuccuuaaacuagucagacuauccgcaccaagcugguuuaagaugcuggguagcauuucugucagcugcuuugucucagcauggccuguaauggugaaaguguucgcugccagagaugccugaacuuuaggguuguuaaaguggaucacuguuccuugguuuguaaacauauucaccucuucaauaccagagauauuguuuaccccuaacuucuuuaaggagaacugaaguuuuuugucaucugcuguggcuguucuaugaaccaccuucuucuuucugcgagcaguuccuuucccaccaaugcgcacuugugccugcaguuuggcgaguuuuuccugguucaugauuguuucuuucaucuucaagugaagaacuucccaacacaguccacucuagaggcaauuccagaugggucagagccagcacgagcuccucauccaaggcaggcagugcuccugccgucaaggcaaauggggucagcagggucugguggcugcaggcugugaggcgauuggccugcgucaccagcagacgagccagccugcaagccauguuguccacguaggucacugagccagagcccauggucaccggagaguaaccuuccgagcagaggcacacagauaccgucaccgucuccugaagcccauggccugggacgcuggacuggagaacguuauccucgaugcgcucugcaaucaugacaugucgcugaugagauccgucauaaguaaaguaaaacucagcaucuucaggaagauacacauuuuugucaaacuucgcauagaucaucaucugcccguaaagaggugcuucgcugcagcucaacuccauggcuuucgcaucuggagcgauggccccgcagccuccagaacccaggcgaggcucugcccccgcgcccugccugagggcgccucggaacgcgcccccagccagccgccgcccggaguccggaaggcucuccccggcgaugccaacgccuggcggcggccgggcugaagccaagguuu

SEQ ID NO: 2838 - RNA, 1014 nt, Homo sapiens
gugauuuuaaaucuuuaaucaaauuccaaagguuaucagccauauuacaugccaugauuagcuuucuauaagcaauuuuuuuuacuguguacagaucggugucaaugaaauaaaaaaauaaaacuguauacuaggcaaagaacuuuauuaaucuuuguuucaaacuugauucccaggcuucuucggcuuaauuagcugcaaagaaugaauuguguauaagcaaaaacugaaaagagcugcaguguccaaggggcuugggcuuaaaaauauuagagaucuagauuuuaucagauccauaaacaaaaauuucuuaaaaagcagucauaauauaaaauagcagcucccaguaacuucuucagguuuuaucuucagaaguugacucaauucaguuugccucauucuuggaagccucaucaaaauucuccacaagaucuggaacuucaucaucaucauccucuccaguagcaaguggugcuuuuccauccacagauuguuugggcagagcuucggccagucuccuuaaacuagucagacuauccgcaccaagcugguuuaagaugcuggguagcauuucugucagcugcuuugucucagcauggccuguaauggugaaaguguucgcugccagagaugccugaacuuuaggguuguuaaaguggaucacuguuccuugguuuguaaacauauucaccucuucaauaccagagauauuguuuaccccuaacuucuuuaaggagaacugaaguuuuuugucaucugcuguggcuguucuaugaaccaccuucuucuuucugcgagcaguuccguaaagaggugcuucgcugcagcucaacuccauggcuuucgcaucuggagcgauggccccgcagccuccagaacccaggcgaggcucugcccccgcgcccugccugagggcgccucggaacgcgcccccagccagccgccgcccggaguccggaaggcucuccccggcgaugccaacgccuggcggcggccgggcugaagccaagguuu

SEQ ID NO: 2839 - RNA, 1039 nt, Homo sapiens
gugauuuuaaaucuuuaaucaaauuccaaagguuaucagccauauuacaugccaugauuagcuuucuauaagcaauuuuuuuuacuguguacagaucggugucaaugaaauaaaaaaauaaaacuguauacuaggcaaagaacuuuauuaaucuuuguuucaaacuugauucccaggcuucuucggcuuaauuagcugcaaagaaugaauuguguauaagcaaaaacugaaaagagcugcaguguccaaggggcuugggcuuaaaaauauuagagaucuagauuuuaucagauccauaaacaaaaauuucuuaaaaagcagucauaauauaaaauagcagcucccaguaacuucuucagguuuuaucuucagaaguugacucaauucaguuugccucauucuuggaagccucaucaaaauucuccacaagaucuggaacuucaucaucaucauccucuccaguagcaaguggugcuuuuccauccacagauuguuugggcagagcuucggccagucuccuuaaacuagucagacuauccgcaccaagcugguuuaagaugcuggguagcauuucugucagcugcuuugucucagcauggccuguaauggugaaaguguucgcugccagagaugccugaacuuuaggguuguuaaaguggaucacuguuccuugguuuguaaacauauucaccucuucaauaccagagauauuguuuaccccuaacuucuuuaaggagaacugaaguuuuuugucaucugcuguggcuguucuaugaaccaccuucuucuuucugcgagcaguuccuuucccaccaaugcgcacuugugccugcaguuuggcgaguuuuuccugguucaugauuguuucuuucaucuggagcgauggccccgcagccuccagaacccaggcgaggcucugcccccgcgcccugccugagggcgccucggaacgcgcccccagccagccgccgcccggaguccggaaggcucuccccggcgaugccaacgccuggcggcggccgggcugaagccaagguuu

SEQ ID NO: 2840 - RNA, 1083 nt, Homo sapiens
gugauuuuaaaucuuuaaucaaauuccaaagguuaucagccauauuacaugccaugauuagcuuucuauaagcaauuuuuuuuacuguguacagaucggugucaaugaaauaaaaaaauaaaacuguauacuaggcaaagaacuuuauuaaucuuuguuucaaacuugauucccaggcuucuucggcuuaauuagcugcaaagaaugaauuguguauaagcaaaaacugaaaagagcugcaguguccaaggggcuugggcuuaaaaauauuagagaucuagauuuuaucagauccauaaacaaaaauuucuuaaaaagcagucauaauauaaaauagcagcucccaguaacuucuucagguuuuaucuucagaaguugacucaauucaguuugccucauucuuggaagccucaucaaaauucuccacaagaucuggaacuucaucaucaucauccucuccaguagcaaguggugcuuuuccauccacagauuguuugggcagagcuucggccagucuccuuaaacuagucagacuauccgcaccaagcugguuuaagaugcuggguagcauuucugucagcugcuuugucucagcauggccuguaauggugaaaguguucgcugccagagaugccugaacuuuaggguuguuaaaguggaucacuguuccuugguuuguaaacauauucaccucuucaauaccagagauauuguuuaccccuaacuucuuuaaggagaacugaaguuuuuugucaucugcuguggcuguucuaugaaccaccuucuucuuucugcgagcaguuccuuucccaccaaugcgcacuugugccugcaguuuggcgaguuuuuccugguucaugauuguuucuuucauguaaagaggugcuucgcugcagcucaacuccauggcuuucgcaucuggagcgauggccccgcagccuccagaacccaggcgaggcucugcccccgcgcccugccugagggcgccucggaacgcgcccccagccagccgccgcccggaguccggaaggcucuccccggcgaugccaacgccuggcggcggccgggcugaagccaagguuu

SEQ ID NO: 2841 - RNA, 581 nt, Homo sapiens; identical to SEQ ID NO: 2533

SEQ ID NO: 2842 - RNA, 731 nt, Homo sapiens; identical to SEQ ID NO: 2532

SEQ ID NO: 2843 - RNA, 3379 nt, Homo sapiens
uucuggguuucugcauuugaaacauuuauuucaggaaauacauuuucaacacuuugucauuuauacaaaaagacaaauuucucgggaggcacguagcaaaaggccauugaggaacagagccugaugaaacgaacaauuuuucaaagucugguuacagagaaggaaagugaagcaucucaaggcugggaugcugcugcccacccccaccccaccccgccaccaagugacauugaggcugggcaggccacauggccugggcccuggcgcuggccacucauuuccuucaaaaucuugguuuuggcaaaaacauggcaaguuggcaaaguaaacugucucaccaguggggguggugagggguccuuccucucuuggguggggagggagucagacgcccagugccccaacuuccaugcacacacacucacacucauacacuccuucucgcugaccuucuccuggcugcaagcagccagcccggugccugcagaugcaccuggugaugugugcaccugaguggagucucaucaggccccucuuucuccccaggagcaagacagguaacaggaagcaggaagggacuuuggucaucugugcccugcaaagacagcccccauggguccccucguggggacagagggugaggggccgggccgugcugccacgaaaccuugcucuucagcuguggacugugcaccccugacgcccguucucuccuuucuagggguucguuaccaugggcucugaggggaggggcccaggcacggguagaucaacagagucaggcucgccuggccucccaccuccccagcucagagagucagcaaggccugggccaggaagggugaguggcagggguggcuggcugggcauuaauguaacuacagcccagucuugggccaaacccagacacuagacagacagacggacacgcauacacauggacacacacacacuucccuggucacuugggcagggcaggcgccgggcagcucacgccacucugaccagcccaagccacggcccacacgugcccccgccaaccuuccuucuggcaccuuccauggcucccucccucagcuccuccaccagacucacuugcuuagaccuuuucaaaacugggggaugaggggguaggggucaucucuccuuccuuuuuauccucaaucagaucccagcgcaucagcagcaccugcagcccggugggggcggggguggcgugagagggggauggcagggagaugaagacgccucccucauuccagccuguccccgcaucuggccaagcagucugcggauggcugagauaaaggcacuuucugcuccaggaggggcagcugccagggggcuuggaguggcugggcagucgguggcaggggacccuggaguuuucuacccuuaggagcagggcagggguaggggcugagugauggccacaccauguggcgggcaggggguccaggugcuccuggugggcugcauucuccccugggcucugacacacuccaggggacagggccgauggggauggaggggagcgugcagcccacugggcuccucugcaagugcgaggccuggcccccaccccaaggccuccggcacugagaaccccacacagacggaugaucugcacaccgaagcugcucuucugagcccucggggagccaggccuggggacagagggucaugucaauucagugggugcucucaccccugccuguggcuccagugcagccuccccacaaccucggggaggccgcggccucaucacugacucacucggagggaggccccuucccuuguuuccuggcagcaugucgaagggguggggaacgaugacaaauggagaaaaucauauaaaauaaaaugggguggugggagggccuggggggggacggaaaugacuugggggcaggaucccgggggugggcaggguggcgucuacaucuccggggcuucuggcuccuucuccuccaugccguuggccauggcgcugcugcccucguugaggcgcuucacacgguacgccucgaaguggaugcugcuggugauguccuugauguucugcaugugcguccugaugagaaggucccgcagguaggcaaacucacagugugugguguuuucaacuucgaugguaccccacuuggucuuccucccaaggauccucuugccguugaccugguacucguggucacugcccaccacagcaaaugggaucaucucccggaacuucucguucaccagccgguccuccgaguccucaucaaauuccuucuggggguacacgucgaugccguuggacagcaggucugcggugauccgcuguuugaaguggacccucuccuccagggugaguguguccgccuuggcgaugacagggacgauguugaccaccuugcucaggcguuucauaaacucgauguccaggggccugagggaguggccgguggcggggaugaaguagaggcagcaguggacgcggguguccgggaugcgcuucuugcgguugauguugaccuccuccugcagguauuucucguacuggucauugaugaacuucaugaugggcugccagcaguucucguuguugaugugguccccgaacccuggugugucaaucacugucagcuucauccggacgccuuucuccucaauaucgugcgugauggacuugaucucgauggucuuggggaugcgcuccucugaggugggcugcaccgacuuccggcugauuuuggauuugaagaggguguugauuaagguggauuuacccaagccgcucugcccugauuccauaucucuguauucugccccaaaaugccuccacuggaagccauaaacugggcccaaguccccuucuucucugguggagaaucccaggcuguccaaaaagucucgggauccauuggcaucccagauuuucacucccuuggaagacagcucuuuagcauuuguggaucccuugauaaaccacagcaacuccuccaaaacacccuuccagaacacacguuugguugucagcagagggaauucaucucucaggcuguagcgcgccugcaugccgaauaccgacagggugccggugcccgugcggucguccuuccugacgccgcagcggaggauguguuggaucugccccagguacugcagcuccccgugcggcggacgcggcucggcgucccgcuccugugcggcggggggcaagggccggcgcggcagcuccgagccggccacaggcauggcgcggcgggcgggggacggaggcaggcgaaguggcgcggcgggacggaggcaggccaaguggcgcggcgggacggaggcaggccaaguggcgcgguggcaggaccccuuccgcgcgccuuuucccgcggccgucccg

SEQ ID NO: 2844 - RNA, 939 nt, Homo sapiens
aaguguuuucugggugaaguuuauucuguuuucacaucuagguuguuggggagagugauagacaaaguucuggauucugggcaucgucggcgcaugcuuguaauccuacuugggagguugagacaggaggaucacuugaggcuaggaguuggaggcugcaguguacuauguucgcaucugugaauagccacugcacucuagccuggacaauauagugagaacccaucucaaaaaaaaaaaaaaaaaaaaaaaggcaaaguucuagauccuaacuggaagaguuaggccaagaaggaagaagagguucugggagcugcuggcuacuccucauccuccucacuaucgagauacuuguggguggcguagcccaucagggcaccaauauuaccuaugacgacgcugcugccaccagccccgaggcucugcagcguggccacuagccccccggcgggcacgccgcccccauucaggaucgcagaccagcucaucagcgaggcagccaccgaguuggccgcgaugccggcgccggugaagcccagcgcgggcagcccggcgacugcgaguccuccuccgacggccaugaaggucagggccuuccagaacccggagccgcuguccgagcucuccgagcacuuuuucuuacccgcauucucaccugccuccaccccacugcaagugaagagcagcagguagcacaagaaaagcgauaccgccuucugccgcaugguggcgccgcgcgcgggcuccgucacuagaccuggccucccgcagucgccgucagcgacaggaagggucggccggccgcccagucuccgcacagagugugcucccgcggaccgccucgcgggcugccaaacggccggacccccucagcgcgcuacgcccccagccgcgcucgcccugccuguguccgccauuacgcgauuccccgcccugggc
